United States Patent Application Publication US 2025/0205292 A1 - sequence listing, part 4

SEQ ID NO: 7 - DNA, 1740224 bp, Lactobacillus jensenii
  source 1..1740224: mol_type = genomic DNA
gtgttcgatttacagaaattttgggattactttaacaagcaaatgcgacaagaatataacgaagtcgcttataatgcctggttcaaaaatacaaagcctgtttcttacaataaggaaactaatgaactcgtcattgctgttaaaaatcctattgcaaaaggttattgggaagctaacctttctacgaagttaatccaaacagcttatgcttacggaaattttgaagttttacctatttttgaagttgacggtgatgagcctactgaacgattcagagctccgcaaccaccaaaaaaagtacctgaacgcagtgatagtcctataaaggatgattttgttactaaaaatctacaattgaatgaaaaatatacttttgatactttcgttcaaggagaggggaacaaacttgctgaaggcgcggcccttgctgtagctgataatcctggtagcttttataacccactctttatttttggtggcgtaggtttaggtaaaactcacctaatgcaagctattggtcatcaaatgctgggcgagcgtccaaatgctaaagtagtctatattcaaagtgaaacttttgttaatgatttcattaattccataaagaataaaactcaagatgaatttcgtgaaaaatatagaactgctgatttattgctagttgacgatattcagttttttgctaaaaaagaagggattcaggaggaattcttccatacttttgaaactctttataatgatcaaaaacagattgttatgacttctgatcgtttaccaaccgaaattccagatttatctgaacggttagtttcacgttttgcttggggcctacaagttgagattacaccgccagatttagaaactcgaatagctatcttaagaaagaaagctgaatctgaaggcttagtaattgacgatgccactctcgactatattgcttcacaagtatcaactaatattcgagaacttgaaggggcgttagtcaaagttcaagctcatgccacaatcgaaaaagctgatattaatgtaaatttagcacgagatgcattgactgatttaaaattagtccaaaagagtcgaggattacaaatatctaaaattcaggaagtagtagccaactatttccaaacaactgttaacgaattaaaaggcaaaaagcgtgttcgccaaattgtcgttcctcggcaaatagctatgtatttgtcacggaatttgacagatgcaagcttaccaaaaatagggcaagaatttggtggcaaggatcataccacggttatgcatgcctacgaaaaaattgaaaaagatattcgaactgatgcagaaataaaatcagcagtctatgaattgaaacaattattagatcggtaatgatgataaattgtggataactactaaaaatatccacagccttttcaccgcatcaattccgttattttaagggttgaagctagttttcaacagaattaacaggccctactacaactactatttataaatataattattaatataaagaactcctgggaggctattatgaaatttacgattaatcgaaacttatttctcgataatttaaataatgttatgcgagcaatctcttcacgtgcaactatccccattttaagtggtattaaagttgatttatcaaatgaagatcttattttaactggtagtgacacagatatttccattgagattaaaatacctgtaagtgaggatttaaaagttgaatctactgggtccatcgttttaccagcacgcttttttaatgaaatcatcaaaaaattacctggtaaagattttaatttcgaagtaaaagaaggattacaaacacaaatttcatctgaaaatagtgaatttactattaacggattagatgcaaataattatcctcgtctgccagaaattgcttctgaaacggcctttgaaatttctggtaaaacatttagagaaattattaatgaaaccaattttgctgtatcaactcaagaaagtcgtcctattttgacaggggtgcattttgtctttaatcaagcaaaaattaaagctgttgcaacagactcacatcgcttatctcaaagagtaattgatttagaaaatggacctcaagtagaaactgatttgattattcctggtaaaagtttggttgaattatcaagaattatcggagatcaagaccctaaggtaactgtaaatccaggagataatcaagtattattcgtaattggaaacatctctttttactcacgcttacttgaaggaacttaccctgatacagaccgcttgttgccaactaatagtacaacaacagctgaatttgatcgtgctagtttatcgcaagctcttgatcgcgtgagcttattaacacatgctggtagaaataatgttgttaagttgactctagatactcaaaatggagtagctcaattagaaggggattctccagaaattggtacagttgaagaaaagccgttggctaagcaattaacaggtcaaaatttggaaatttctttcaacccagactatttgcaagctgctttacgtgcttcgattacagatactgtaatcatgaactttactgaagcgcttcgtccatttactgtagtgcctggaaaagaagatgtagattttattcaattgattacgccagtaagaacatattaaaaagtagaacagaaaaagagtactttaggtgctctttttttgtttatttcgttttaaatgggctttataagagtatctgaagaaatttagttattttaataggtctacacattgtaaaaaaaacaagctcaaaacggcttatataggctaagaggtttgtttttgtatcgtgaaaagcttataatatataagtaataataaggtttgaggtgagtaaaataaaagtttttaaaataaaaggtgaatttattactttaggacaattcctaaaagaagaaacctatgttggctctggtggccaagcaaaatgttttttagcagaaacccctgtgatattgaatggtcaaaaagaaaatcgtcgtggtaaaaagcttcatgttggtgatgaagtagaagtacaaggtcagatttataagtttgaatagagatgtatttaaaacaactcaaattacaaaattggcgtaattttgaagaactcgaaactggattttctccaaatgtaaatatatttattggtcaaaatgcgcaaggaaaaactaatttattagaagctgtttattttttagcgttaactagatcacatagaactaatagcgataaggaattaattcgttttggtcaaaaagctgcgattttatctggacatgtagtaaaaagccaggtagaaactgatttacaagtgcgaatcaatgctaaaggaaaaaaagcttggataaataggattgaacaaagtaagttgtcacgctacgtgggacagcttactgcaattttgttttcaccagaagatttggctttagtaaaaggagctccaagcttgagaagaaggtttatggatttggaatttggtcaaataaatccagagtatttatatttttcgagtcaatatcgccaagttttgcaacaaaagaataattatttaaagcagttagcaaacggaaaaagtaaagataaagttttcttagaagttttatcagatcaattagcgggtcttgctgcggaaataatatctaggcgattgaaatatttaacttacttaagtgagtatgcaaaaaaagcttatgcagctattagtaatgaaaaagagcagttagaagtagtatataatccatcagtacctttgacctcggaacaaataacaagtgaaagtatttatcatgaagttttagcttgttttaagaaaaatgaagctggcgaaattagaacgggtactactttatcaggaccacatcgtgatgatttgaaatttttattagataaaaaagatgctcatttatatgcctcacaagggcaacaaagaacaatcgcactaagcttaaaattggctgaaattcagttgattcaccaaattacaggagaatatcctgcattacttttagatgatgtgatgagtgagcttgatcatactagacaatcagctttattaaattacattcatggaaagacccaaacttttattaccactacagatttagaaggtatttcctgggaaatagttaaaaaacccaagatttttagattaaaagccggagttatcagtgaaggagacgattaataatggcggatgacaagatgaaagatgtcaaagaatacgaaaaagaagcagataagtataatgccagtcaaatccaagttcttggtgggctagaagcagttagaaaaagacctggaatgtatatcggttcaactagttcccaaggattacaccacttagtttgggaaatcattgataacgggattgatgaatgtttagccgggtttgcgactaaaattgaagttactgttgaggaagatggcagtgtaactgttcaagacgatggtcgtggtatcccagttgacatccaaaagaagacaggccgaccagcggtagaaactgtttataccgttttgcacgccggtggtaaattcggcggtggcggatacaaggtatctggtggtttgcacggggtaggtgcctcagttgttaacgccttgtctactaaggttgaagtaactgttatgcgtgacggtaagaagtactttattgacttcgaccatggtcgtgttaagcatgagttaaaagaaatcggcacagttgatccaagtcaacatggtacgattgtgcacttctaccccgacccagatatcttcactgaaaccattgtttttgacgataaaatcttgaaaaaacggattcaagagcttgctttcttgaataagggccttaaattaactttcactgataagcgtaagaattcagctgaaactgatgtttaccactatgaaggtgggattaaggaatacgttgcctttttggatgaaaaagaagaaaagctctttgacacaccagtttatgttgaaggtgactatgatggcattaacgttgaagtagctttgcaatatacaacaggctataagactacgatgatgacttttgccaacaacattcacacctatgaaggtgggatgcacgaggctggctttaagacagctttaacgcgggtaattaatgactatgctcgtaaggcaaaaatcttcaaagatagcgacactaacttgtccggcgaagacattcgtgaagggatgactgcagttatctcaatcaagcaccctaaccctcaatttgaaggacagactaagactaagttaggtaactctgatgctagagctgctgttgataaggctttttcagaagcctttagcaagttcttattagaaaatcctagtgttggccgcaagattgttgaaaagggacaattagctgaaaaagctagaattgctgctaaacgtgcacgtgaagttacccgtaagaagtcaggcttagaaattgccaacttaccaggaaaattagctgataacaccagtaatgatccagaaatttctgaattatttatcgtcgaaggggactcagccggcggttctgctaagcaaggtcgttcaagattaacgcaagcaattttgccaattagaggtaaaattttgaatgttgaaaaggcctcaatggaccggattttggctaaccaagaaattagaaccttgtttactgcattaggaactggttttggtgctgacttcgatgttaaaaaagcgcgttatcataagttaatcatcatgactgatgccgatgtcgatggtgcccacattagaaccttacttttaaccttgttctatcgctacatgaagccaatgattaaggccggttatgtttatattgctcgtccacctctttaccaagtaaagcaaggtaaaattattaagtaccttgatagtgatgaagaattgcatgattatttaggctcacttcaaccaagccctaagccaactgttcaacgttacaaagggttgggtgaaatgtcagctgatcagctttgggaaacaactatggaccctgaaaaccgtcgtcttgaccgggttgaccctaaatatgccgaagatgctgatgctgtctttgaaatgcttatggggaatgaagttggcccacggcgtgactttattactaagaatgctaaatacgttgaaaacttggatgcataaggaggagctagatggataatcaaggccaagatcgcagaattagaaatgtcgatttaactcacaccatgcgtagctctttccttgactacgcaatgagtgttattgttgcgcgggcattgccagatgttcgtgatgggatgaagccagttcaaagaagaattctttatggaatgaatgaattaggtgttacccctgataaaccttacaaaaagagtgccagaattgttggggaagttatgggtaagttccacccacacggtgactcttcaatttatgaagcgatggcacacatggcgcaagacttcagttaccgctatatgttaattgatggtcacggtaactttggttcagtcgatggggaccgcccagctgctatgcgttatactgaagctagaatgagcaagattgcgcttgaaatgcttcgtgacatcaataaaaacactattgattggcaaagaaactatgatgatactgaaaatgaaccattagttttgccggctagaattcctagtttattagttaacggtgctagtggtatcgccgttgggatgacaactaatattccacctcacaacttatctgaagttatttcaggacttcaccttttgatgaaaaatcctgatgcaactaccatggatttgatgaaagtgattcctggtcctgatttcccaactggtggggtaattatgggtcgcagcggaatcttacatgcttatgaaagtggtaaaggtaacgttgttgtccgggctaaaactaacatcgaagaagaaaagagtggccgtgaacgaattatcgttactgaaattccattcatggttaacaaggcaatgttagtacaaaaaatcgctgaattagctcgtgataaggtaattgatgggattaccggggttcgtgatgaatcagaccgtcatgggatgcggattaccattgatattcgccgtgatgctagtgcaagtgtggttttgaataatttattcaaagaaacccaaatgcaaactaacttcgggatgaacatggttgcgattgttaatggtgcacctcacttcttaactttgaagcaaatgctccaatactacttggatcaccaagaagatgtggttagacgcagaactaagtttgaattagacaaggctgaagctcgagcacacatcttagaaggtttaagaattgcgcttgatcatattgatgaaatagttaatatcatccgtaattctcaatctagtgatattgccaaggccactttgatttcacgttttgaattagatgacaagcaagctcaagctattttggacatgagacttgttcggttaactggtttggaacgcgacaaggttgaacaagaatatcaagacttgttagttaaaattgctgactacaaggatattttggctaagcctgaacgaattgaccatatcatttacactgagttattagacattcaaaaacgttttggtgatgacagaagaactgaaatcacagcaagtgaagttgtttcaattgaagatgaagatttaattgaaaagcaaaatgtccttttgacattaactcataatggctacattaaacggatgccagttagtgaatttagaactcaaaaccgtggtggtcgtggaattaaaggtatgggtgtgcaagatgacgactttattgaacgtttaacttactcaagtacccacgactacttactcttcttcactaacaaaggtaaggtttactcaaagaaagcttacgaaatccctgaatatagccgaattgccaagggcttaccaatcattaacttgttgcaattagataaaggtgaaaagattcaagcgatgattaacgtgcctgaaggtcatgaagaaggtaacttgttctttatcaccaagatgggtgttgttaagcggactagtgtcgaagaattcagtaatatccgtaattctgggttgattgccttaactttacgtgatggggatgaattgagtaatgttttgaccactgatggtaagcaaaacattattatcggcacgcaccttggttatgcagctagcttcaaagaaagtgacgttcgtgtaatgggacgttcagctgctggtgttcgcggaattaacttacgcgaaaacgactacgtcattggtagtgaagtgcttaagccaggtgctgaagttttagtgatttctgaaaatggttatggtaagcgcactgctgtcagtgaatatccaattaaaggccgtggcggtaagggtattttaactaccaaagttggtaagaagaatggccgacttgctggtatgactgtcgttgatggtacaactgacattatgttaattaccactgacggtattatgattagatttaagactgaagatgtctcacaaactggtagagcaactatgggggttcgtctaatcaagttaggtgaaggtgatagtgttgctagtttgactgcagttcctaatgacgatgatgatagtgaaaaaagagacgaaaattctaaatcagaagaataaaaatcttgaataaaaagcaaaaattatcaactttttggtgtatctaattagtgataggaaaaaactatcaggatcacgtataaaaagtttggtaatttttttgttctgtgctagaattgtgaactgtgagtaatatttttttgattactccttgttcttaaactttagtaagaaccatttagtccagaaggaggtgcaatagtcaatgacaaccaagtatgaagtaacttacatcatcaagcctgatattgacgatgaagcaaagaaagccgttgttgataaatacgataagattatcgctgataacggtgctacaatggttgaatcaaaagactggggcaagcgtcgttttgcatacgaaattaacaagtatcgtgaaggtacttaccacattatgactttcactgcagaagatgcaaaagcagtcgatgaatttggtcgtctttcaagaatcgacaaccaagttttacgttcaatgaccgttaaattagataagtagtttattttcgtgaattaggaagaggaggaaataggtatgattaatagagttgtacttgttggccgtttaacacgtgatcctgatttacgcactactggtagtgggattagcgttgctacctttacattagctgttgatcgtcaatatgctaatgcacaaggtgaacgcggagctgattttattaactgtgtaatctggagaaaggctgcagaaaatttctgtaactttactaataaaggttcattagttggtattgatggccgcatccaaaccagaagctacgataataaggatgggcaaagagtttatgtgactgaagttattgttgataatttctcactacttgaatcacgtaaagatcgtgaagctcgttcccaaaatagtggctatgcgccacaaaataacggaagttcatacgctggaaatagtaatcaaaatactaatttccaaccaaataatagtgctccaaataccaataatgctgcaccacaggatccatttgctgattcaggttcaacaattgatatttcggatgatgatcttccattctaaattaatagaaaggatctagagacatgcctcaacaaagaagaggcggccgtcgtcaccgtaaggtagacttcattgccgcaaaccacatcgactacgtcgattacaaagatgttgatctgttgaaacgttttatctctgaaagaggtaaaatcttaccacgtcgtgtcactggcactagcgcaaagaaccaacgtaagttgactattgcgattaagagagctcgtatcatgggcttattgccattcgtagcagaagactaaaacagatattaactatcgcagttagcttttattgctaactgcgatttttttatgcattgatacgtggtctaaaattaaagatacggtataataaatttgatgtagtttattttcaagctagagaggatcttcatgaaagacttttttagaaaactagaattaccggagtttataaaagactcacgattaagttcttcagttctaatcgttatctttttatcactctttagtgctgtagtcggagttatgattagccccttttttgggttagctatggtattaattttcgttttaattgtagcttttacagtctatggagcatatatattagccggtaatgcaaataattttgcagctaatttatcatatcgcattaagcgtagtgaacaagaagccatgattaagatgccattgggtattttactttatgactctgatcatcatattcaatgggtaaacccatatttacaaatgtatttagacgatgaagatattttaggacgttctatttcatcagttgacccagaattgggaaaaatttttgaaacaattttgtctagtaagaagacatctcaaaatcagcttgtaaaatggggtaatcgtcaatttgaaataattgttcaagataatttgggggttatttatttattagatattacccgttatgctcaaattgaagaaaaatatgaagctgaaagattggcaattggtttaatattcattgataattacgatgaattaagtcaggggatgcatgaccaagaactagctttaatgagttcatatgttcaaaatacattgagtgaatatgctgttaagttccattcatatttaaagagaatagacgaggatcacttcttgttgcttgcacatatgcaagatttgaaaaaattagaaggtgataagttttctgtactcgataaagtgcgactagaaactagtcgtaataacacgccattaacgctttcagttggtttggcttatggtagtgactcattaaatgaagtggcggatcaagctcaatccaatttggaccttgcattaggacgaggcggagatcaagttgtcttacgtgaaccaggtaaggaagcgcgtttctttggaggaaaatctaatccaatggagaaacggacgcgggttcgtgcgagaatggtttcccaggccttgcaagagatttttaaagatgcagatcaaatatttgtagtaggacaccagcgcccagatatggatgcaattggtggtggtattgggattgttaaaattgctcgtgcacacggagtaaaggctcatgttgttttagatactaatcatactaattatgatgtgggacgcctggtagcgagattagaaaaagacaaggatttagacttatttattagtccggaggatgccttagcccaagcaactgatcaatcattattggtaatggctgatcactctaaatattcaattacttatgatcctaagttatatgaaaaattaaagaatcgattagtaattatagatcaccaccgccggggagaagagttccctgaaaatccaatgcttatttacattgagccatatgcatcttctacatgtgaattagttactgagatgattgaatatcaaccacaacgtggtgagcagttattgactgatttggaagctacagcaatgttagctggaattactgttgactctaaagaattttctcttagaactggtactagaacctttgatgctgcaagttatttgcggtcaattggggcagattcagcaattgtatctgatttgttaaaagaagatatagagagtttcactcaaaaggctaagttagtagctagtttaaagatgtataaagatgatatagccttacttttgggacccaacgataagataatagacccaattgtgacagctcaggcagctgatatggcattatcactagaacacgttgatgctagctttgcagttactaggcgcaaaaaagatacaattggtatttcagctagatcaatgggagatatcaatgtccaggtaattatggaaaaattgggtggtggaggtcacttatctaatgcagcaacccaattgaaggatattacgattgatgaggcaaaagaaaaactagaaaaagcaattgaagattatctagaagaaaacgaataattattttaggaggtttcttatgaaagttatttttgtacaagatgttcgtggtcgtggcaagcgtggagaagttaaaaatgtgccagatggctatgcacaaaattacttaattaaaagaggcttagccaaagaagctaacaaaggtaatcttaataccttgaagagagttgaagctaacgaaaaagcagcctatgaagctgaaaaggctgaagcaattgaaattaaaaaacaacttgaaaatgacaatactgttgtccaattcaagtctaaagctggttcagatggtcgtttgttcggctcacttagtggtaagaagattgttgaaggtcttgaaaagcagtttagcatcaagattgataagcgtaagcttgaattacctgaaccagttaaagctcttggctatactaatgtaagagttaagttgtttaagggtgttgaatcaacaattagagtacatattactgaagaataaggtagtacataagaaatggataatgtagtttcaccacaaattcctcatgactcagaggcggaaaaagccgttcttggggcgatttttattgatcctgaggcaattgctgatgcagaagcgatagttactgtagatgatttctatgagcgggctaatcgaatcttatttgctgctatgaaagacttggcggatcgtgacgaagctattgatcctttaactattcgtgatgaattagctaagcgaaagcaattagaagatataggtggtattgcttatataagtgatgtagctgtagcgacacctactagcgcccatgttacctattatgcccaaatcgttcatcgtaaatcgcaattacgtcgcctaattgctgctagtcaaaaaatcattcaaaacgctatggaaggcagcgatgatgttgctaatattttggatgatgctgaaaagcaaatcatggacgtatcatctgatactaattcagctggctttagaaatattaaagaagttgtacaaaaagcgcttgatgaaattaatgccgcaacagcagctgatacagatgtaacaggactgtctacagggtttgttaatttagataaaatgacaacgggtctgcatgaagatgagttgataattttagcagctcgacctggtgtaggtaagacttcatttgccatgaatgttgctcaatatgcaggcttgcatgaccataagacagtagctgttttttccctagaaatgagtggggagcagctcgtccaaagaatgcttgcgtcagaaggcttaattgattctatgcaccttagaacggggcaactaaataatgaagaatggaataaattagttgttgcagcaggagcgctagctacagcttcgatttttatcgatgatactcctggtatcaagatgagtgaaattcgtgctaaagccagaaaattagctaaagaagatggtaatttaggtttaatagtaattgactatttacagctaattgaaggaccaaagagtgaatcacgtcagcaagaagtttctgcgatttcacgacaattgaaaaaattagccaaggaattacacgttccagtaattgctttgtcacagctgtcacgttcggttgaacagcgtcaggataaacgacctgtattatcagatattcgtgaatcagggtcaattgaacaggatgcggatattgttgctttcttatatcgagatgactattatcgagatgaagatggtggcgaagataataaccagcaaggggatgatgataacggagaagttgaagttatcatcgaaaagaaccgttcaggtagtcgtgggacagttaagttaatgttttctaaaccatataaccgattttcaaatttggattatgctcatgatgagtaaaaataaaaaggatgtttcacgagaaacatccttttttaatccttaaaattatagctctcaaagaagataggagctttacttgagtcattactcttcgggacagtactgaaatctacttccgaaaatggcaaataattatttttagcactttgataaattagtttaatcatttcagttgcaacttggcgtacttcaggatccatgcccattactacttttcctaatgtccaagtaccgcgaatacggtgctcagtaaatacattcatatccgtaatatccatattttcaaaagctagaaaaattgctgaccataattgcccacgtttttctgatggaatagattggttaaactgaattaaggcgtgtcgaattatacgagcagaagttgttaatccttctgctaatacaaaactatcgcgaccaacactccaattaagtggagtgtgttggtgcatcattggatagacactctttactactaaagttctttctggatgatcaagcataattccaaaaacagaaccctcaggtacataagtacgcattttatctatagcgcgtttaaagccggcactttctgtaaatactgatcgataacctggaccatcaaaacttagagaattgagcacacgatcttgaatatcatagcgggcatctgctagggaatggattgcataatgtccaccctttgaatggccggtaatataaattttacaatctttaaacttatctgccattgcttcaagatagtcacgagctacagtttggccataaatttgataactgtagttcataatcatgtcctcattccagccaacgacagaactatcagttcctcggaaggaaattaaaatagtattttcatctaattgcagggttagcgccgcaaactgcaaaggcgtaggattagcctctaagcgagatgtccaatctaagatttttaaatcagcaaaacgaggacttttgactaaaagtcgcgtttccgtttttcggtgtaaatctaaagaaccactgtaaagtgccagaattcgctcacatgcttcttttaggctatgacctacaattgactcatcaaaaggtaaataagcaatagaggctaaaatagcaccatctacactgttatattgtctttgcttgaatgataaatcaccacgccaacgtaaatagtctagtggacctgccatctcatccatcctctcaaaatataatagctatattgtaatactttatttttagaaaataaaaaaagagccaaaacttgactcttccttaatcttatttaccaccacgggtataaataattcgtttaatatctggatatttgcgtaaatgcatgatgatattattttcatcaatcttgttattaataattccatctgcgttaaaaacgatttggtcatcatcgacatctaaaatcttaatggcaattgattcaacatgattattttcaagttcagtcttaatttcgttaagaatgtttggtgtattgacgcaaacaatttgaacattaaaacgaacatgaataataactcgtgaaataattgaatcatcatggaatagcatttgaataaagaaaataaaaattgttgctaagacgccaatggtgtataaaccggacccaactgccataccgatagcagaagtagcccaaacaccagcagcagttgttaaaccagaaatttgttcacggcgaactaaaatggttccggcaccgatgaaggaaatacctgtaacaatttgagctgcaattcttgaagggtctaaagcaatttcatttgttgtcaacaagtcgtaaaaaccatatttagagacaatcataaataaagcagatgcaacagcgacaacaatgtgagttctcacaccagcgcttttacgctggatagcgcgttcataaccaattacggcaccacaaagtgctgcaacgatgattctaatcaaccattcaacttgagtggtaatactggcaatagctaaaattgtcattttgatactccctttatatttatagtaaatcaatacaatttccattctaatataaatttgagtaaaaagcagaaaaaatttttaaataaaagcttgcataaacttatcttttatggttaaattattaattgtgttaaggcaacacacaaagttgctgacttagctcagttggcagagcacctcactagtaatgaggaggtcgaaggttcgaaccctttagtcagcattagttaaacaatttaatagtttttaagtctatcaattaagttcgaaagagcttgatatgataggcttttttgttgtttctagatatttgtgtagatttaaaaatagttatgaatatttagtttcaccacaaaaattgccacacagtttttctagtgtggcatctgtgtggcaaaggttcgattaatgttgtagtggcgggctttattgcttgccatttttttcgttttcaaagtatccatgatttaagaatgactgtcgatactcttttaagatttttatttgatggtctatggcaggaactaacgtatatgcattatttttattgtagaattcatccattaatttagtattcgattccttgtagtccttaatgaaattactatcattttgattcataataatttcttctaactgcatacgaataactaaattaacattattaatcatttcaagatcattggcaccttccaatgattcttcaaattttttatcaaataaaaatttgaatttatctttccaaaaatttattacgtatgatttctttttataatcttcatcatttttagtaaaagaatcagcggtatctttatctccatttatagaaagaaagtgagaaatattatttttcatattactcaattcttcattattatcataatatgctgaaaaaagtaaattaattaacttactctctacttcttcacctctaattccttcgccttttacataagatactggaactttaaatatttctgctaaagctttccatacctcttcatttggaattctgcttcctgcttcgtatcttgctattgttactcgtgtagctgatatgtttttgttctttaaaagattagatagatcttgttgtgtaaaataatttttttctcttagttctttaattcgatttggagtcatattattacctcactaagattaattttatacgattggtacataattagcaaaagtaccaattttggatacaaaagtgttgactacaagaatgaataattgtatattatatgtaaccaaatgtggtacacaaaattataaataaccatttttggaaacaaaaaagaaagagggaatattaaaaatgtccagtaatgtaacaaagcaaggtgaagtactatctaccttcaacgaaagtagtagtaaaagaaccccaattcaatcagcattaacaagaccgttggttgaagcaattggtaagtgttttctattgttgagcggaaccacagaagaagttcaagatcctaatgatgagtctaaaactattccgcgcgcagtatacgaagtaagagttattagctctaaaactagattacctattggaactgtgctaacggtgaaaattaaaggaggtaagagtgtaattactgatgaagagaataagaagttactgttaggcttagagaaaaataaggtagtagcattcgacgatctaagtcattggaactttaacggaaatgagggattatcagcttcaggtatgcgagtattagaagtcagtccgcaagaggctatgaatttatagaaatgaggcggcttatatgaaaataaaaaaattagtcttagataccaaaaacccgttaggcaatcctaacggggtaaaaatggcattaggagtaactttattatcttcaattggtcttgagtataaagttgcacctcaattcataaatgctggtaattataccgcattagcttatccatttttaattaatattatacctctagggtatccatgctggaaatgggttaatctccatatcgttaattataagatctataagcaattgatgaatattgttcattcggaacaattaatagactatggagataaaaaagaaactaccactttcggtgaaagaaaagttgaatatggtgtcaagatcgtctatgaagaaacggcagaaggtacatatattactgtatatcctaatggtataaaacatagcgacgccactcagacgctaaacaataggctagaggaaactttcaacatgaatgttttatcggtagatcatcagctagcttatacgaaatatttattgagaaatgtaaacagacaaagaatggaggtttctaatgataacttctaatttcgtaataaatcttgataagaatacatcattcagttttaaaggtagtggtgggattcttgtcactgggagaagtggctcaggcaagactaataccaccacatatataatgctgaaggcgatgtcccaatgtgattgcggtttatatattattgatgcaaaaagagctgatatgtatggacttcatcaatttttaaaagatggcaagaaggtagtggcaagtacaacaaatcaaatagcacgattgttgcgtgttcttaatgagaacatgagcgcacggtatgagcattttaagaatggaaaatggggacaggatttcgctgaatatggatatagaccatatttattagtcattgatgaagtatctgcgatgttggctggggctggtaagaataagaaagaaataatgggtgaattgcgtcaagttatccttcgtggacgacaagcagggatatttacccttatttcagggcagagaattgatgcaactattttagatcgtgatattaccttacagttaggtacaagaatcgtgatgggacaagcagattcggagacttatcgcatggcttacccaatggtaaatgatattaaagcattaccattagtacctaataagccggggtatggtcttatctattcagatgggcaaaaaattagcaatcctactccatttgtctcaccggatatgtctaacattgatgttccaggggtaattacgaggttagagaataattttgatccatctaaatatattgatgaatcaagctattgggaggtttagtaattgataagttgccagctggcgggcgacagagtcgcacgaatggaatgtccaagcgtgagcgggctggcaacacccaactaataatatgggtgtaacggaaagattattaatcatgaaaataatgaataatataaaaatcgaccaaattcgtttaaatattccctatgatgagaccaatcaagtaggagatagtcaaggtttacctaaagaagttatagttgctgataacctgctacatctagcatggttgttcaagtccaatacagtgagtcatggacataatggctatacttcttcatataattttggatctggagaacaaggcggaaatatttccgtaatgtggaatgaaacaagaaaagatatgggaatacttgtcgactttactgcgacaggcaaagcgttatatgaaagccttgcggaattacatggaattcctgttaattggaagaaaataattgaaaaattatatgaaaaaatgggacatatatcgagactagatatagctactgatttaatcaattatggtttttcgattaatgaaattattcaaaggttaaagaatgaaaaatcatttttcttgaatatgcaaggaaataagataaattctaatcgctttaaaataataggaagttatgaagaagcccaaactctttatgtaggaagtagaagaagtgatgcttttttgagagtttatgataaaaaggttgaacaagatcgagctagtggactttatagaaatctagctaggagttgtaacgattgggtaagagtggaagcggaatttaaacatcgattagccaaagatttaggaagatatattgcgacattaacaacggataatatttacccttatttacttggttgtgtactagaacgctggtcattagtcgataaggaagagtaatggtatatgataaaatccaatattctaaagaatggaaagttttaaaagaattatcgaagggacagggactccaagaactaacacaagctcaaattgatgcttctttaaatagaaaaattaattggttcctatatggtggtgctagtggagtcatttcgatgattaaagaaatctatggtaatgaagcattaaaagaattttatcagtttttagattactttgtttctgatccagatacatggggacattattaccattcagacaagataaatgcggatgctaaaaccattgaagatgctacgcaaggattagatttcaaggaatatttagaaggcttaaagaaggaattaattgaacaggataagcagaaaggtaggagttaatatgtttggtacagagttgcttaatgctaggcaagtagcaaagaaattaggtattagctatacttatttctttaaaataagaaaaggtggctgcccatatcatcaacttgggaatcaaggacgtaagtattacgttttaaaggaagtgcaagattggctattggtaagtagtcaacgatagtatgggggcgtggtaatttgctacgccttttctggagaataattatgtcaattacacaaattaaatcgggaaagaatgagggtaagtaccgagtaaggatccaaccaactgataatgaaacagggaaaacgatccctgttccaagtagagttactaggacaagcagtaagcgagaagcaaaaaaacttgaagaacaaatgtgggtagaatatcgcgcgcgtcaagaagttaatttagatgtgttaaatcagccactttcgatagctttggataattatgttgaagaagagaaggcttcgggacgctggtcctctattactacttacgataattggaaatatactgttaaacttgtttctcaatatttcggtaagaaaaaagttagagatattaaagaaaaagacatgcgcaatttcgctagaaattatgttaagacccataaaacaactgtagcccctcatactacggtagacaggcagttacagaatttgaggggatatttttcaactttgaatgatgtgggaattacgagaaatcccgttccaatgaaaccattgtctaaattctttagacgcgatgaaatgagtttagctacaaaaaagtatgtttttactaatagtgaaattgaagctcttaaagaagagatttacaaggaattaaatgtagtaaggattaattattggactacaagaatagccattttaatagcgctggacacaggtatgagaccacaagaaattcaagcactaaagtggaaccaaattatcgatgatggaaagtttaaagtatttcaaataaatgattcatggagcgaaaaagagaagcatcttaatggtcatttgaagagtagatcacgtggagattttagattaaccttccctctttctgagccacttttgcagttattgaagaagtttcatcaccatcagttagaacttttaaaagaaaatgatttagttaattcaaatgattggttaatgttgaatataacagactataatttatgttcgttaggctacccgattactcaaaaaagcatgaacgatatgttgaagcgattgagtaggaaagtggaaattaataatcaagaattaaacataagtatgtatacatgtagacacactgtagcaacaaaattaggtaatactccaggtatgtcttatccttgggcggcaagtagattggggcattctttaaagatgtttatgcggacatatgtccacgtagatgaagatagaaatgaagaaatgttacaacttttatctaacaatcaaaattagtaataccaagaaaatcaaaaaaagagattgatcatcttcgttaataataaaaacgttgatagtcaatctttttaattaatctgtataagcaataaagatggtagctggtaaagtagtttcaatattatttggatctggtatattaatttttctttcgattaaattaccagttgccttataatggtcaaaatcgctcgataaagaaagccattctttatccatgtcattaataatattttctaattcagaatctaacataactacataaactttgcttttatttaatggagcttcaatgtcattaatatatttatgaaagatcttagctgggtgttctagttcatacattccacgaactcgcatatttgtgcgtcctagtttatcgactccatgagctcttgctaattctttagaatctattagttgaatatcagaatttgtatttttaattgatcctctaataccttgtataattttttgataatatttattatttggaaccatagtattgccataagcaaaccagaggctaattaattgatactttttatttagatttttagtatttaaatttccaactgcatagataataggctttttatcccaatctacatcaggttcgtaaattagagagtctgatggataattttgagtatttcttgtgacataatctttaggatacgagctatttaatggaattgtactgtaagaattatcattaacttttttagactctaccccaactcctccttgcactattaaatctggaaaatgcgaggagtccccagtccatgataaaagttttttgtattcagcttccttttggtctgcatatgtgtactgtaatgcgtcccaacaaaacatatctttgataaagtattcaagattatcaccgacagcatttgcggaaccatttgacttaaagattggagttaatctagttgaattatgtttcaatatatttcttagagcaataaggacattagttttagctttcattttattcctactttctatgtttattattttggcaccaaacctaatactggccaagtcattttgaatgtgatatccttatatccataaggagattggtttatatggctaaagaagagaaaaaattcatttcttcactttctatgagttcagaagaagtagcttcagtactcaataaaaaaataatagaagaaaaagaagaggctagacgtaatcaaacgtctgaaagtaaagcttttgaacaagaactttttaaaaatgcaaaatatgatcctaaaaaaataaatatactttctctttttagtggagcaggtggattagatttaggtacagagttgtcagccattaatcaattttttggaaataatatttttaaaaatagttttgataataaaaatatttttcatgaatatgctaataaaatacttaatgtagtttatagtaacgataattataaagctgctaatttaagttataagcaaaatttattagctgatggtatccaagatactagagatattagaaaagtaactcattttccgaaaagtgatttaatgctgggtggtttcccatgtcctggttttagtgcagctggaccacgtttattggatgatcctagaaatttcttgtatattcattatattagagctttaatggactctaaaccattagtttttatcgctgagaatgttaaaggattgatgaccatggctcatggtcaagtacttaaacaaattagagaagactttgcggcagctgggtattatgtaacagttcaacttctaaatgctaaaaattataatgttccacaatcaagagagcgtgtatttatagttggtgtaagaaatgatatccgtaatgattatcaatacgaatatcctttaccgataactgggactttacaagctccgttagtaactttgaaagatgcaattggtgatttaccagagcatcctaaagatgtatttgacagtgattatagttcaatgtatatgtcaagaaatcgtaaaaagaattggaacgacgtttcatttactattcaagcttcaggaagacaggcacctcaatatccaggtggagaacctatgaaaaagatttctaaagaaaaatggatatttcaaggtgaattaaatagaagactttctgtaagagaatgtgctagaatacaaacttttccagattggtttaaattctctgatggtaataaagttaatgtaaaagagaacaatagattaaatgagaaatataagcaaataggaaatgccgtgcctgttctattagctaaagaagttacaggtaatgttctatcatatctaattaataaacttaatatctctcctaaagtctataatgaaagaagggtaaatgaaggttaatctccatttatcttttttgatcgtattaaatattttattaattcaacacaatagtcagtattttttaatacttgattaccccaaaaatggataggagtccaaccgatttcttttaataaaatatcattatgctgatctctaattttatttttttcaattttaggtatccagtaacttctatttctttttattcttttctttttttctttccaattgaatccatgccaaaattctccatctacaaatatggcaatcttatatttggttattgctatatcaggtttaccaggaagtgctttatagtttcgtctatatctgattccctcattccataaagtatgagctaaaaaatcttcagttttgctttttccatgagattggagtttcatgtttttgctaatctgaggtgaggttttaaagtttatttttgtcatcatagttaaattgtaaaactaatattaattgccacaaaatttgccacactatttttgagtaattgaataaaattgttgttttgatagaaaatgaaaatggtgtcttctatgcttttagtcagcattagaatgaatgaagttggggcaccgatacgttcggtgtcttttttgttgtctaaaaataacagcaataaaaagacgcttcactaatagtaagggaaacatctttttaattattaagctaattgatattttttgattttatcgtaattataggtttcttcagctttacgaatatcgatatcattttgcaaattgagaaagtaacgatctgacaaaccaaaaaagcgaccaagtcggacagatgtatcgactgtaatcttacggcgatcatgaagtaaatcttgaattcttgaagtaggcacatcaatacctttggctacagcataggcagaaaggttgagaggttctaaaaactcttcgcgtaaaatttcaccaatagttggtaatggaattttgttcatggtaattacctccttaatggtaatccacaatttcgacatcataaacttgattaggactgacaaacgtaaaacaaatgcgatattggtcattgattcgaatgctgtactggccggtacgattaccacttaattgttctagatgattggcgggtggtacccgtaagtcatttatattctcagcattgtcaatcatgattaactttcttaaagcaatatgctgaatattttgaggtagctttttagaaaagttacctttatatattttttcagtttctttatcagcaaattgttttatcataatggcattccttaattttgagtaagcgtattatatctgagggaaatgtatatgtcaagtagatatagctaaaaaataaaattgccaaaaaattttagacttatttgctaaatacaatattgaagctacggttgatgtttttggcgataagagggctaatcctaattgtggaactaaattcgcaagcttcagggcgatgatttgaggtcttactgtgtatatggacacttttgacttagtaaatgaagctaaatggtagagcaattcatttgaatctaggatagatggtaataggctgtatggtcgtagcagtgcagatatgaaaagtgggcctagcagcagagctaatcacttaaaagctcagaattattaatgggcaacagattcaacgcagaccagatttgccggtctttattttaggtcctgataagtggaaattagcgcatcaaataaatgaatatacgatgatttcttcatatttagcagtaatagaagcatataagaatattattttgaacttttttgaatagtagttagtaatcctcaacataagttgaggattttttgttttatttcacatataggtaatcttgacaaggaataaatcgggggggataaaatgcgccttgtatgacttttaatttatttggaggaatttatgatagtagggatagttttattagtagtatcaggtttgttatctagccttttttatagtaagaaaaaatatatatggtttttattgtgtttaatttttgctctttgttgttttttagggtttacagcagctattactaatattttgttgtttcaagtaattatgggtgtaacaacacttggaactttaggtatatttgcatatttagttcttttgaataaaaaaggcaaaaatcctagatataataagactatatttgcaataactatatttgctttactatttgcggtaatgggaatatcttcacctaaggattttatgttgcataccgatgaagtaatagcaaaagataaaggcaatcataccaattcaaaatacttcgaagtgttaacttctaaagataattgggatactgaaaataaaatgttttcaattgatactaattctaaaggtaaagtatctctgaaactaaaaggtttgagagattgtacagttactatcaaaaattccccagattttgataaagataccgatcaatcagttaaaatacgaaaaattgaattacgtgcaggggaaacaaaaacattatcatttgttatgaaaaatagtgactatgttgagattgaacttgtgatagttgatcctgatggtaagaaaacttatgtagaattcaataacgagatggaagataattcatctgactcggattccgataccgattcagatagtgatactaatgattcagatgatgatagtagttcagaatcatcgagcaataaaactgattcaaaagataccgatgatgagtctgaagacgacgattatgaaaaagtatcttatgatgatttggctagacatcctaagaaattattaaataaaaatatagaaattagtggtacagtgaatcaagtcgttaaagataaaggaatccaaatggtatatttacgtatggatgatgatcctgatcaaatagtgattgtagctgtttataatgaatttaagccatcaggtagaatacttgaaaatgataatttaactgttaaaggttcagcaagtggaacccaaagttatactacagtgttaggaaatgataaagaagttccttttgtaatagctgaaaaagatgttatagataatggaaaataatggtgtaggttggaaagaagattatatgttcaagtaatcatatttcccaggcaatataggaagtaagtagtttacttactttcttttttatttgtaagtacttgactaatttgtaccaacaaattatattaaaaatgtaaacgcttactattgaaagataagaggtcaatgatatgtttgaaacaaaaatgcctaatggttttctttggggtggtgcagttgctgcccaccaattagaaggtgcttggaacgttgatggaaagggtccttcagttgcagatgttatgactgtaggatcaactgaaaaagatcgagaatttactgggaaagttttacctggtgagaattatcctaatcatgaaggaatagatttttatcatcattacaaggaagatattaaattatttgctgagatgggctttaaatgctttagaacatcaattgcttggacaagaatctttccaaatggtgatgaagaggagcctaatgaagcagggttaaagttctatgatgacttgtttgatgaatgccataaatacggaattgaaccagtaataacgcttcaccactttgaaataccgctacatttagtaaataagtatggtggttgggaaaatagaaaattaatcgatttcttcactcgttttgctaaggtttgctttaagcgctacaagagtaaagttaagtattggatgactttcaatgaaattgataatcaagcttcatttaataatccattcttaatgtgtactaattcagggattgtctttaaagaaggccaaaaccgtgaagctgcaatgtatcaagctgctcactatgaattagtcgctagtgccttggctgttaagataggtcatgaaattaatcctgactttaagattggctgcatgattaattatgcttctatttatccagcaacttgcaagccaagcgattgtttattagctcaaagagtagctgatagacgttactggttcagtgatgttcatgttaatggtgaatacccagaagaacttgaaatgtacttaaagcgtaagggatatcgtcaagatattactgaagaagaccgtcaagttttacgagaaggaactgttgattatattgggttcagttattatgcttcaatgacagttgctagtgacaaggtagatgcggacagtttaactgatttagatgaagctaaggtgcataacgaatatttaccaacaactgcttggcattgggagattgatcctgaagggttacgttatgggcttaactggttaactgatcgttatcataagccacttttcattgttgaaaatggtatgggagcttatgacaaagttgaagcagatggttcaattcatgatgagtatcgtattgattacttacgtaagcatatcagcgaaatggaaaaagctgtagccttggatggtgttaacctaatgggctatactccttggggctgcattgacttggtttctgccggaactggtcaaatggataagcgttatggatttatttatgttgataagaatgacaaaggagaaggtactttggctcgttcaagaaaagattccttcttctggtatcaaaaagtcattaaatcaaatggtgctgagttagattaaaaataggataaagacaatggctaaagcagagagtaaaaaagaatttaaagaaaaaagtttgtattataatcgctattttagtttgcgctatttaactgcaggatatttctttgttaacttttggtggttaatagcattggcaatgggtggtagtgaggttgttttattgccattagcattgttattgctgtgtgtaccggcgatttgggaacaaaagcaaaaatttgatcaaagagaagataatgaactgccacaaactaagcattatttcttttttcaagtagcaataaatatctttttgggaatttgttactttactccggcttttagctatttctatccatttataactacttctgcttttagtatagtatttatgcttttacttttgggtttggccattggagtatggagcttgcatcatattattcaaattgaaaaaaatgaagatcgattttttaggagatatgaagcttatggccaacaaaagtaatcaaaaagttattttcttggatattgacggtacgttatgcgactataacggtactattcctgattcagctaaacaagccatttggttagctagaagcaataatcatttggttttcttaaatactggccgaagtaagggagaaatggatgctgatttacttaatatcggttttgatggtatgatttgcggaaatggaaattttgttgaagtaaatcaaaaggtaattttgcatcagccgctacctgaaacagttgaagtagagattgttaactggctaaaagagcatcatagtgagttctttttagaaagtaataacggcttatttgctagtgaacattttagagaaaaaggtttaccagttgtgcgtgcttatgtccaaggaaaaggacaaacagatgtaagccacatgaccgttgatacagcttttccagcaatgcaatatggggagtcaatatttcgcgatgatgtaaataaaataagttttattttaactgatgaggttcaacctgaaatagtaaaaaagcaattcccacatcttgaatttggaacttggggtggaagagatgaacagccactttttggtgatttgcgtcctaaggggattactaagtccaatgctattaaatatctactccaatatttgaatttatctctgcgtgatacaattgcgtttggcgatgcacaagttgatattccaatgtttgaactctgtgggattggagtttgcatggaaaatggtggtccaaatgctaaaaagaatgcagatttagttacagatgcggttatggataatggcttgtaccatgcttttgaaaaattgtctttaatttagtaataacattttttattcaaaagaaggaatacctgtttaggtattccttcttttgttataagcaagttacgtgattatagaacgaaatgtctgaagtaaagtaattgataatcgaataattaaacgcaacattatttcttagatagttaatttcagtaatttgtacattaggagtgttaactggaatgctgagctttttagaatcagtttcattagtatatgacattttgataaattcatcggcatcattaacttcgattttgtactgcttctggatgaattcaaaaatagatccttggcaaattttttcatctaaataaggtactaatttttttagatagtaagttttttccaagcaaaataattcattattaaagtaacgtaaacgctcgatgtaatatatgtccgctccaagctcacaacctaatgtttcagcattttgtttattagcttgaagaagcttaaatgaaagtattttggtttttagttttttcaaaatagtacatttatcttcatatgattggggccttgttgggtgaataccatctttacttgccattaacattaattcgtcattattaatgagttgctgattgataaaatatccgctcccctgaacccgcttaattatgccgtgattagccaggattgaaattgcgttacgaatagtgtttcgtgacacgtgatattgatctattaactcattttcactaggtaattgtttcttgaattctttataaaatatcttctctgagatatttcgagcaatctccatatattttctcattttacttctcccaataaatactctttttggtacttgctaaatttgtaccaacatattacacttacattgtaagtgaaagcggttacttaatcaaatgggtgagctttcaatcagccaagttattaattttttggaggtgttcattatggctgaaaagactattatgttatgttgtgctgctggtatgagtacaagtatgttggttgcaagaatgcaagatgctgctaaagcagatggggaagatgtagaaatctttgcatgtcctgctgcagaagcagatgataagctttcacaagaaaatgtaagcgctatcttgcttgggccacaagttcgttacatgcttgattcatttaagcaaaaagtaagtgataagaacattccagttgatgttattgatatgcaagcttacggcatgatggatggcgaaaaagtcttaaagcaaggcttaagcttgattaaataggaggcttaattatggataaagatccaaaacaagttgcagatttagtcaatgatgctgctaagaaagaaaaagaagctaatgaactttcaatgcagcaaacaatgatgttgattatgaatgccggaaatgcaaaagcattcgccaaggaagcaatagatgctgcgaagaagggtgactttgataaggcagaagctaagattaaagaagctaatgaagccttaattgatgcccataatacacaaacaggaatgcttacagaagaagcaagaggcaatcacgccaagttaacactactagtagttcatgcccaagatcacttaatgacagcaattacttatattgatttggcacaagaaattgttgaggtttataaacagatggcagagttaaagaattaatttctgtctctaagtagaggaaataaagatggaaaacaataagataattaaatttatgaacgaacacttattgggaccaatgggcaagatggcaaactttagattcgttcgtgcaattatggctgcaggattagcatcaattccatttacgattgttggatcaatgatgcttgttttaaatgttattccaatggcttttccacaattacaaggtatttggaatgcaagctttgttcattttacaccactttatatgactataaactatgcaagtatgggggccttagcactatactttaatatagttttaggttatgaatataccaaaataattgctacagaagaaaagataaatatgacaccaatgagtggtgcacttttatcaatgtttgctttctttatgactttaccagaattagttgtaaagagtggtactgtagaagttgtttctaaagcaattaaagatggaacaggaactgttagtggttttagtgttagctcatcaggtcttgatagattaggtacttcaggaatttttgttggtattattatggctgtattggctgtaaaattatatcaattagctgtaaaacataattgggttattaagatgccacctcaagttccaactggtgttgctaatgctttcactgctttaattccagccttcttagtgggtttggtagtaatcattattgaaggtgctttaatttttgcaggaactgatatctttaatgttattgcactaccatttagttttgtaactaacttaactaatacttggttaggtattttggtaattattttcctagttcatttcttatgggtaatgggtatccatggtgcaaatattattggtgccttttatactccgattgctttagctaactttgctgctaactacaagggtgctcattatgtatttgccggtgaatttatgaatatgtttgttattatcggtggttctggtgcaactttaggaattgttatttggatggcttttagagctcgttcagcacaacttaaggttttaagtagaacggcaattgtaccagccttcttcaatattaatgaaccaattgtttttggttgcccaattgtatacaatcctatcttaatgtttccatttattcttgccccaatggtaactgccacaacttcatactgggcaattaagcttggtattgttggtaaggttattgctcaaatgccttggccttctccattaggtatcggggcatttattggtaccggtggtgactggaaagctgctgtattagcaataattaacgtattccttgccttccttgtttggtacccattcatgaagatgtatgataacaagttgcttgctcaagaaaaagtaaaccaagcaagtgaacaaaaataagcttaacacctcaataaaaaacagccgaattttattcggctgttttttattaaataagttaaaataaacttattaacgaaagtgggtgataaattatgaacttacgaattatttttgataaactaagatcatttttttcgtggagtaaagcacgtccagctcgtaaagttactggcttgataacttatgaaaaactagagagttttatcggtgattttaagcaattaactgaaaaaagacaaaatgctctaattgggcactggcttgctaaagaaggctgggtattttcttttgaaaatttagcagaaggaagaaaaatattagcaggttgtcgtcaaagatataatagtgatctgaataagtacttagaaaaagtatataagcgtaataattatcaagttttgtggcaacagttagacgacttaattactaatagtgaatcagacaaaaaatattcttcaattactgattatcatgatgctttgatattgataaataaatatttaaaagaagacaaaactgcgggtcaagttattttaccagctttatttggaatggttgaatatgccttagttgttaagttaggctttttacacattagaaagtatggtattcgtgacaaatgtgaagaatatcgtgaaaggataaagaagcaagtttttgatcctaatgatactagaaaactggaaatttactgtgtattaacttgcttttctcattggtgggatacccgatatcaacaattcgtggctaataaaaataaaattggcttaggaagacatacagtaatgcacggccgagtaaatccacatcgctttacgctgatagaagtagctaaaataatctctttactccacgcaatagttaatttgcctacgtttgaattatatttccaagaagaattgtagaaatccaatataaagatttgtttcatgtgaaacattaaaagttgatcttttgactgagatttttgatacaatcaagtaaaaagttgaaaggactgaagggctaataatgaaattattgcttacaggagacagtattgttgctcgtcatgaaggcttaagcgaaccacatattaatgcctatttaaaagaaaacttttcagatattgagattgtaaatactgctgtaccaggtatcaatagccgctatttattagctcatctgaatgaattagttttaaaacaagtaaaagctgattatctgataatcttaatagggaccaatgactgtgctttccataaaaagattgaagaggaagaattttggactaatttaaataaagttgccaaaaaaattcttaataagtatgaggctaagcaagttattctggttagtccacctgcagttgatgaagagaagcagagagttcgtgataatgaaacagttgaaaaatacgctaattgggttcaaagagttgcaaatgattatggtatgcactatttgaacttgtttcataaaatgaacacagatgatcatgaattagaagaaatttgccatggacttcgaaatgatggtctacattttggtaaaattgggtatcaaatttttggcgatggcttaattgatgaaattagaccgaaaaaatggcatcaaaaaattattgataagtctcaaactgctacatatacagttactaaactgcctttaaggatacttatttgtaatattcgtgattgtttatatattgttataaagagaatggagctaattgaagaaagaattttagataatcctaattggggtctttctctaaataagattattattttaggtgggctggggctaatatggctatttatatctgtttttagataaaattattgacatttctttttatcactgatagtcttgtacttgactttgatacaagtacaagaaagatatgaactaatggatacaaaatttgcagtagctttacatattttaacaatgataagtgaagagacaagtaagcttagttcgcaaactctagctaacagtgttggtactaacgccagctatattcgcaaaattcttgctttattgaaaaatagtggcattattacttcgcaccagggaaaaacaggatatcagttaactagattacccgaacaaatttctcttctaactatatacttagcaattcaagaaagtgatcatattcatttatttgctgttcatcaaaatgctaatcctaagtgtcctgtaggtaaatatattgaatcagcaatgaggccactttttgctgatattgaagttcaattggcagaggccttacggcgtcaaactttaaaagacgttattgataatctttattacatttcccaacaaaaaaagactcaagacgagaaaaaatctatataactacttgataagaaaggaattaagcgatgttagctgcactccatactcaatatgacaaaaataatattaaactaaaaataagcgagatcgctaagccaaagattagctcccaacaagttttgattaaagttaaagcggcgggagtcaatccggttgataatatgattagtcgaggtgaggttaaactaattattccttatcaactaccccaagttgcaggaaatgaattagtaggtacgattgaaaaagtaggggaacaggttactcgttttaaagttggtgatcgcgtttttgcacgcttaccgattgaggccattggtgcatttgctgagtatatcgctgttgatgaagtggcgttagcacaggtaccagaatatttaactgatgttgaagctgcagctattccattaacagcattaaccaccatgcaagcattagaatttatgaatattcagccagggcaaaccatatttatttctggggggactggtagtgtcggggcaatggcaattccaattgctaaggctaaagggttgacggttattactaatggcaatagtaataatgcaaagtcggttttagcgctaggcgcaaaccgttttattgattacaagactgaagactatactcaaactttgaacaatgttgattatgtgctagatactttaggtggagttgaaactaaacgccaaatgatgattatgaaacaaggtgggcaacttgtttctttacgggcaatgcctaatggggaatttgctaagcgaatgaatcttcccaagtggaaacaagttttgttcaaaatagcaggacataagtttgatagtatggcagctaagcgtaaggtgggatatcatttcgtttatgttacgagtaatggggctcaacttcaaaaagctgctgatatccttgaagctagtaaaattaggccatgcattgatatggtttatccatttgaacgtgtcaatgatgcacttgctaaggttgactcgggccactcacatggtaaaacagtattgaaattctagttgttataagagataggcatattgattgcatttgtttatagcaaatgagtttcatgtgaaactaaattaacaattgacacttctttttggtaagtgtaaactagtggtcgtaattattaaggagagccaaacgatgaataatttaacatttatcaatgctaatatttgttgtagtggagcgtcacagatgatgtgctccactttttggcatactcaaaattaattaagcaaaaagtaagcaatatttatctatgacgctaattcaatgattgaattggcgtctttttttattctcaggaggttacaagatgaagtttaatagtaagttaattcatggcggaattagtgaagatgaagcaacgggagcagtgtcaattccagtatatcgagcatcaacttatcataagccttttttaagcagtaatttgaagtgggaatattcaagatcaggtaatcctacgcgagctgctctagaaagcttaatggcagatttagaaaatggagcagacgcctttgcttttagttcaggttcagcagcaattcacacagtcttttcactcttttcagcaggcgatgagattatcattggtaaagacgtctatggtggcaccttccggttagctaaccaagtgatgaaacgctttggcttgaaattcacagtagttgatacgcgtaagcttgatgaggtttcagcagccattaagccaggtgtgaaagcaatttatttagaaacgcctactaatccactacttgaagtatctgacttagctgaaattgctaaaatcgctcaagaaaaaaatgtattaatgattgttgataatacctttgcaagtccatacaaccaaaaacctcttgatttaggtgcagatatcgtggttcattcggggactaaatatcttggcggtcattcagacctagtggctggaattgccgtggttaaagacgaaaagattgcagagaaattggcctttttacaaaattctattggttctgtcttgtctcctgatgattcatggttattaatgcgtgggattaagactttaggtgctagaatgcgaattcatgaggaaaatgcgcaagcagtgattgcttatcttttgcaaagtaaatacgtcaaaaaagtgctttatccaggcttgaagactaatccaagttttgaaatagctaaaaagcagatgaagggttttggcgcaatgatttcttttgaattagctgatgaatatcaagttgccgattttgttaataagttacggatgatttctttagcagaaagtttaggtggaattgaaagcttgattgaagtgccagcagtaatgacgcatgggtctattcctcgggaaataagattaaagaatggtattagtgatggcttaattagattgtcagtgggaattgaagataaagaagacattattgccgatttagatcaggcctttaagagcttagactaagcatttttctcccaattaaagctagattcgttataataaaaataagacgaaaaaagggagatttttcaatgcttttaatttcatggaatattgattcacttaatgctgcactaactagtgattcagctcgtgcgcaaaaaactagacatgttttaactcaaattgcagaaaaagaaccagatatcttagcgattcaagaaacaaaattacgtgcaactggtccaactaaaaaacatgctgaaattttacaggaaatgtttccggattatgattatgtgtggcgttcatctgaagaaccagctagaaaaggttatgctggaacgatgtacttatacaaaaagtccttaaagccagaagtatcatatcctaagattggggcccctgatacaatggactttgaaggccggattatcactttagagttcccagaatactttgtcactcaagtttatacaccaaatgctggtggtgaattgaagcgtcttagcgaccgccaaggttgggataaaaagtatattgaatacttacaagaacttgatgtacaaaagcctgttttagctagtggagactataacgtagcgcatgaagaaatcgacttgaaacacccagaaaacaaccaccattcagccggctttactgatgaagaaagagcagattttactgaactacttgcagctggctttaccgatagttttcgtaagattcatggcaatattccagaagtttattcatggtgggcacaaagaattagaacagctaaagctaataattcaggctggagaattgattactggctaacaagtaaccgaattgcggataagattaagaagtccgaaatgatggatactggtgaacgtgcagaccactgtccaattgtcttagaaatcgagttataaaaataaggcatcgcaaatgatgccttttgtttttggagaggatttatggaaaaagtcttaaaagatgcaattttaaatggtttgtatgatacaaagtatccaggacaagtcaatttaacgccccaacttttatctaatagtaatgaaaaaatctggctcagcttgcgtcaagaactcataactgctaactcttttacttgggcagttgcctttattagtgaagacatgctggttccactaaagcaagtattagcagatactaagatctcaggaacaatcattacaggctcatatctgcaatttaacagccctaaagtttttactgaattaatgaaaattccaaatttaacagtgaaaatcagtaataaaccaggcttccatgctaagggctttttatttaatcatgtggattatcaaacagcgattattggctcagctaacttcactcgctcagcaatgttggctaatagtgaatggtgcttaaaggttagctcaactcaaaatgcgggtttaacccagcaacttcaagctgaattgaatgatttgactaaaactgcgactcctttaactactgagtggattgatgattatgctcaaacttgggcaaagcctcaagcccaagctcctattattacccaggaaataaagccaaacttgatgcaaaaagaagcaatcaagaatttgttcaacatcattaatcaaggccaaaagcgagccttagttgtttctgctacagggacaggtaagacttatctagcagcatttgcggtcaagaagtatcagctaaaacgctttttgtatcttgtgcaccgggctcaaattgctaaaaaggctatgtctagttttcaaaaagtaattggtgggcgcaagagtgattatggtcttctttcgggaaaacaccatgattacgatgctaaatacttatttgcaacaattcagactttaagccaggaagacttattaaagagccttgatccagctgaatttgattttgttttaattgatgaagctcaccgtacagctgcgccttcatatcaacgggtcttgaatcatttagagcctaagtttttactcggtatgacagcaacgcctgagcgaatggataaagaaaatgtttttgaaatctttgattacaacttagcttatgaaattcgcctgcaagatgcccttcaagaaggaatgttaacgccatttcactatgttggagttgaagactacgaagttaatggacaaagtattgatgaaacaacgaatttagcttatttaacagctagcaaacgggttgattatttacttaaagaaattgattactacggttattgcggtcagactgttcatggcttagtattttgcagtcgacaagcagaagcaaaagaattggctcaggaatttagtaagcgcggacatcaggccattagcttaactaatgaaaataccgagtctgaacgtcagcaagcagttaatgacttagaatcaggaagaattgaatacattattaccgttgatttgttcaatgagggtattgatattccttgtctaaatcaagttatcatgctgcgaaatacgcaatctagcattgtctttatccagcaactagggcgtggcttaagaaagtatcctggtaaagactatgttacagtgattgacttcattggtaactatcaaaacaactatttaattccattggctttaactggtgatcggtcagcttcaattgatcgcgctaagcgggaagcacaactaccgtcatttgttggattgtcaacgattaatttcagtcgtattgctagcgagagaattttagcatctttagctaaaatcaagcttgatggcttaaaacaacttagagaagcctatcatgaactaaaagataaattaggcaagagaccattactttatgatttctatcgctttggttcagtttctccactcgtttttgctcaaaatactagtcttgcttcgtatgctacttttttgaagaaaatgggtgaagagcttactcttacacaatttgaaagtcaagtcttgagctttttaaccaaagaattattacccgggaaaagaattcatgagttattgcttctgaacctattattgaagcatgaaaaagtcactagtgagcaatttgaaactgagttaaagcagcatcatgcttattgcagtcgtgatctattagcttctgttcaaaacttcttgatgctagatttcttcgatgttaaagctggtaaaactaccaaaaaagcccaatatggtaatactgcattaattgagcgtttgaacttgtttgactttacttttagtcaagagattaaaaaagctcttgaagatgttgattttaagactttatttactgatctaattaagacgggattagctctaaatcaagcttttgataacagccaggaatttactttgtatcagccttatgatcgcaaagatgcctgccatttacttaattggccactagatgttagcgcaccgatgtatggctaccgagtaggagaaaaggattgtccgatttttattatttataataaaactgaagaaaagcgcagtagtatttaccaaaatgacttttctgatggacgtagcttgcattggtatactcgttcaccgcgacatttagattcagacgaagttcagcgcttattaagtggcaaagttaaattgcacttatttgtcaaaaagagtgacgcagctagtcgcgagtttttctatctgggagaggctaagattatgcatgcgcaagaagaaaagattggtcctaagcaaaaagccacagttggtatggacttgcttttacaaacgccactaactagtgacatgtatcaaatgcttttcactagtgaaaagtaagtataatgatataattacacataactaaataacgaaagtgaggcaaattatggctttaagaggattaaatgatacttacactttgaataacggtgtaaaaattcctgttgttggctttggtacttggcaaactcctgatggtgaagttgcggaaaagtcagttttagcggctttgaatagtggttatcgtcatattgatactgcggctgcctatggtaacgaagaaagtgttggccgcgcaattaagaaaagtggcattagacgtgatgaactttttgttactactaagctttggaattctgatcatggctatgaaaatactaaaaaagcaattgatactagcttaatgaagctagggctagattacttagatctttatttgattcactggcctaatccagttgctatgcgtgataattgggctgaattaaatagtgaaagctggcaagctatggaagaagcccaaaaagccggcaagatccgtgcaattggggtatctaattttagaaagcatcatttagatgccttattagaaaatgcggatgtaattccagctgttaaccaaatttacttaaatcccagcgacttagagtcagatgttcgtaaagaaaatgacaagcatcaaattttaagtgaagcctattctccacttggaacaggagatttattaggtaatgaacttgttaataagttagctcaagaacacggcaagagtcctgcccaaattttaattcgctggagtttggaacatggctttttaccactacctaagtcagttcacgaagaatatattaaagccaatggtcaagtctttgatttttcattatctgcggatgaaatgaagttacttgatggcttagaaggaaaaggcaactcagccttagatccagaccaagctaatttttagattcaaatcaaaatcgttgcaagagcaacgatttttttatatacttaaagtgtaataggaaactaatacggaggctcaattatgaaacgctcagaattaaaatttaatgctaaagaaaaactacacaacaattgggcttggggagctctaatgtcattaatgcttatgctaattgcctatttggtcagcagaggaattatgtttctcatgtttggttccgctggtatttttggctttatgatggcagaacgtgttttgacagaggatcctggctttgtaatttccttatttgtaagttttgcaggttttgtttacctattatcatttggtatttcacttattactggtatgtttgataagggagttcagattggttatttacatttagtagatggtaaaaaagaaaataatgttttcaaaaatatctttttagccttcagaggtggcagaacttataactacttcgtcaatgttttattaacttccatcttcactggattatggtctttactattcatcattcctgggattgtaaaatcatattcatatgcaatgactttttacatcttagaagatatgcataaggctggaaaagaagtaggtgtaactgaagccattactaaatctcgtcaaatgatgaagggacataagtttcaattatttgttttagatttaagttttatcggctggggaattttagcaacacttgctttaggtattggctggctatggcttgttccatacattcaaacaactaaggcagaattttaccgtaagctagcagctaataactagacaaaaataaaattaaatagtattcaaaataagtattgcatagcaatgcttatttgagtataataatttctgtgagaaagatatatttctctcggaggtaaaaacatgaaaaatacaaaattttttgctggtattgtaatggtacttatgtcactctacatgttatttcaagctgtaactgcacatctagcaactaatgctatgattgcaggaattatcttcttagttgcaggtattgcatacgttgcaactaaggacatggataatttaactggcgacattgctggtttagtcttgaacttaatcggctggtttatgactatgtcaattccaactgttagtttatttggagtttttgctttaattatggcagtcgttttattcggcttaactcttatgctaaatagtggaaactcagctttagcaaaataaattcagagaattcaattttggataatacaaaagagacatcagatgatgtctcttttgtgttacacgtgaaactatctaccttttttgaaaaagcatgttataataaatattcccaacttttgagatagaggagataaacctatgcgctatcagcaacttatatttgatgttgatgacactctgattagtctggcatcaactgaaagcttcgccttgcaaagcttatttaacgcccacaactggcgactttccaataatctaagacgacaatatcatgcttataaccaaagcttgtggcgtaagttagagcagggagagttaacttatcaagaattaagtgagcaatgttttcgagtctttttaaaagaaaacttagatattgatgttgatggtcaaaagacaatggatgagtatcgctcatactttggtgaagcccatcaattgttgccaggtgttgaagataccttgcgctttgctaagagtgaagggtataagttggcagttttaagtaatggtgagcaatttatgcagacgcatcgcttaaaattagcaggaatttatgattattttgacttaattgtgacttcagaagaagcagggtatcaaaagccagatgagcgaatttttgattacttctttagtagatctgggattagtccagataaaactttattttttggagatggactacagtcagatatcttaggtgcagagcgttacggtttcggtagtgtttggtataatcatcaccatcgcaaaaatactttaaatttacatcctttatttgaagttgaaaattacccacaatttgtgaagttaatgcaagcagattttaaaaagaaatattgaatgtaaaaatcattatattaaaaaaatcccacctttgttgaggtgggattttttagtaactaattttattatttcatcattgataaaacgagagcttgcaaaccagttgccatgaatgcaccaactaatggaccaaacataggaacccatgcataactccaatgtgcgttacctttatttggaattggcaatacagtataagcaaaacgtggaccccagtcacgagctgggtttaaagcaaagccagtagtttcaccaaatgcttgaccaattaccatgattaatagacctaaaataagtggcttaagaccagtagtgaagtcacctaagtttaaaagaattaaaacaaaaataaatgtcgcaattacttcactgaggaagttaaaaataggattgtcaattgcagcaccagtggtaaaaataccaacgtggttaccttcatcttcattctttgtagctttgaagtgagggtagtagtggattgcaataattgcagctcctgcaaatgctcctaaaaattgagctgtaatgtatggtaaaacgtctttccatgggaaaagaccaaaagtagcaaaactcaaagttacagctggattgaggtgtgctttagaaccaagactgccggctacataaacggcaaaagtaattgccaagccccaagtcatggtaatatgatgccaactagcgccttttgcgattgagccttttaaattagagccagcaccaataccaataccgagcactaataagaccatagtgccgacgaattccccaataaaactatgcatgtaaaaaattccccttttatttagttatcaacgttatgctatagagcatgaatttagtttggaataagtgctgaacaaacttcaaccacgaggtctattaaaggtgttgcacatacgccgctcacaagtgtagcatatttctttttgaaaggaaacaaaaatttttgaatatgtcaaatattttgcttggaagctattaatagatagaaaaaagagatttagcattgctaaatctcttttaaataatttatgaaagttacacgtgaaactttagtcatgtgttaactttaaattgagtagtttgtgaggagctgcgtaagtataatatggctgacgctcatcaaagcaaattaacctaacttaactggagtttcaggctctttaccttcaaccatagcgtagttgttatcaaatgctttaacaaccatgttacgtacagcgtgagtagtgtagaaagcagtgtgaggagttaccaatacgtttggacggtcaattaggtctgctaaacgtgcatctgggaattccttaccttgccagtccttgttgaatacaccaacttcgccttcgtaagtgtccattacgaaaccaaagaccttacctgagtcaagaccacggataactgcgtcagtgtcaacaagtggaccacgtgatacgtttacgataacaacgccatctttcatttccttgattgagtcgtcgttaatcatgtgaacgttagctggaacgtcaggtacgtgaagtgaaattacgtcagccttcttgtataattcgtcaaggctgtctacgtagtaacccttcttttcaagttctgggttgtggaagatatcgaaagcaataacctttgcgccgaagccttccatgatttgcataaatacttgaccaatgtgaccagtacctacaacaccaacaacttggtcacgaacttcacgaccaatgtttggagcccaacgtaagtcgcgcttagccatcttcatgtcagtaaccttgtcttgacgcaatacacgagctgcttgaattgctgcgtgttcagcaatagcgtttggtgagtaaacaggaacgttagtaatttcaaaaccaagttccttagccttgtccatgtcaatgttatcaacaccaacgttacgtaatgacatcttagtaacgccagcatcagctaatgcttgtaaagtttctgcagtgtagtctaattgttggtaaacaacaacaccatctgcacccttagcaagttttgcagtttcaggagttaataattgatcagtgtaatcaacttcaacatccttgtgggcttctttccattcgttaaggaatggttcttcatctttacgaattgcataagcaaaaatctttgtcatgttgtacctccatatattacaatcggatatctttattatacatgatttattgtgaagcagaacacataactatcatattttaatatgtaagcgcttcaagtttaaaaataaacttgaaaatatatcttttaagaaaaaatgctaattagtgaagtctttaattatctttatttagttatttgctcatttaaactcatcatttcaagtaagctttgagcggttgcactgccttcattaccagcttttaatccagctctttgcaaagcttgttcaatattttcagtagttagcatcccaaaagtaattggaatttgtccttttaaatttaattgcataattgcagaagttacattgttaataatcatggcatagtgatcggtttcgcctttgatgacagctcctaaggtcataattccagtatacttattggtttcaaggactttttttgctgtaaagcctatttcaaatgcgccaggaacccaataaatatcaatatcttcatcttttatgccaaattttttgagagtggaagttgcaccgtcaactaagtttttagtaatagtttcgttaaagcgtgaaacgacaattgcgaccttaccatgaacattaataaaattaccttgtttaatcattattttcccctttgcatttattttcccataattaaatgatgaaatttatctcgtttagtttgtaaataaaatttatttatctcatttgctggtatttccagtggaacccgctcagttacttcaatgccatattttgttagttgggtaaccttatcaggattattggttaataaacggattttcttaattcctaaatctgtcaagatttcttttgcaatgttatatttacgttcatctggctcaaaacccaatattttattagcttcataagtgtctcgaccttgatcttgtaaggcataggctttcagcttattggttaagccaattccgcgaccttcttggcgtaaataaattagaattccgccttcatggccgattttttgcattgctttatgtaattgttcaccacaatcacatctttttgagccgaaaacatcgccagtcatacattctgaatgtaaccgaaccaatatcggcttattaggatcgattgggcctttaactaaggccaagttttcaccaacataggcttttattttgaagttgccatatacagtaggtaggtcgacaaattgattatttttacttgcaggatttttaacatattcttgcaattctgcaattgttaaaaatggcaaattatattcagccgctatttcttttagtcggggtcttcttgccatatgaccatcgccatccattacttcacaaatataagcaacttcagcttcaccagctaaacgcgctagagtaattgaagcttctgtatggccattgcggtctaagacgccaccatctttagcaactaaagggaaggtatgaccaggtctgaaaaaatcttcagctttggtagttggatcagctaaggctttaattgtggctgcgcgatcaaaagcggaaattccagttgttgtagttttataatcaacgctaattgtaaatgcagttccataagggtcagtattattttgagccattggagttaagttgagtctttcggcaatgctgcgaccaatacttgtgcaaagcaacccacgggctgtttgagtaataaaattgattttttgtggagtaaccttagaacccagaccgattatgtcaccttcactttcacgatcttcatcatcagcgacgataactaggccgccttgcttcatccattgaactgctgcctgaatttttttaacatccatatttattgtgctccttgaaaatttactagattcttagccacgtatttgcctaagatatcagtttcgacatttacctggtcaccaacgtttaattttgcaagattggtttcttcttgcgtgtgagggattaaaccaacagaaaaaatatcatcatgaatatccataactgttaaactggtcccattaatagcgatgctaccttgagcaacaacttgactaattagtcttttaggtaatttgaaaaacaactcaactgcgttttcattttgttgctttttgactaagaaaatcacatcatcgatatcgccagttacaatatgaccttctaagcgactctttagctgtaaggaccgttccatattaacttgatcgccaatttttgaatctttaaaaatagtctttttgaaagtttgtggcatcatcgtcacagtgaaggttgtttctgtaaaactctcaactgttaagcagcaaccgttaactgcaattgaatcaccgatttttaaatcctttaaattagctggaacagtcttaatcaccattgtgatagtgtgttcatctttttttatattggcaatgtgggcattaccagtaactaatccactaaacatagtcaatcctcccactaattcgaatatctttatcaagtacctgataattaggttgtatcaatttaagattttcagtaatttcaaaaccatctaaagcattgctacctaaaaaagtaggtgaaaagtaagtaatgagttcttgagctagtttttcttcaacaaaagatttcatcagagctggtcctccttcaacgtaaactgattgcaccttgttttgagctaatatttgtaaaacttcagttagagtaccttgatctaaaagaaatactttaacgtgcggtggatatgaagttttagctaattctggattttgggtaaaaatccaagtaggtgcccgattatctgaaaataatgtcagctgctggtttaataagcgtccgcggcggtcaattaccagccgaatagggggatggtcttgtttaatacttgttaataaagttggattatcaattaaagcagttgaactaccaaccattattgcttgataatcagcgcgttcttgatgaactctttgagaagctgcattaccagtaatttggattcgcttgttagggtagctacacttatgatctaggctgagagcttgctttaaagtaacgtaaggtaagttatgctcataaaaataaacatagtgctggtttagctttttagcttcttgagctaatacaccggtagtgacagaaatgttatgcgcttttaatttttttatccctttgccagtgactaaactatgtggatctatttcgctaatcacgactcgtttaatcttgctagcaatgattaaatcgctacatggcggctgcttacctgtatgattacaaggctcaagcgttacatataaagttgaattaaataattgttctggagtcaatttgctaatagcgtcacgttcagcatggacatcgccatagcggtggtgatagccggttgctaagacttgattatctttaacaacgacagcaccaaccatagggttagtccatgtatgataacggcctttgctagcttctgtgagtgcaaggcccataaaatcttcatctgtcttcatcatcaaatcacttcctttttgcatcaaaaaagcctcgagaaaatctcgaggctaaaataatatgcaaagttaaaaaaacaccaaaccaaagccagccaaaaaagcctagcttgtactagtgtcattaatcttctcccatctagactttaactatcggtacctataatcaggattcaaccacttgcgtgggtcgcggactttaccgccggtcgggaatttcaccctgccccgaagaacattttattcaattcataattatcatacacaagcaaaaaaattttttcaagtaaacgatttcagagaccgtaaaatagtttgtgtaaggatgaattattccttaatttaatttcctaaaacattagaaaaaggagttcctttctcgtatgattggtttgaacaaaaaaaacatacagaaagaagaactccttcatgaatgattttaccaaaaatataactcaagctctattcaatcaagataaaattaatgatttgcttcgtcatgaaatccaacaagctgttaatgacatgttagaatctgaactgactgcctttttaggatatgatccctatgctagaaatggctggaatactggtaattctagaaatggtgcgtatttccgtaaaattgatacccagtttggatcaattgaggtacaagtgccacgagatcgcaatggtatgtttcatcaacacactctgccagactataaacaacatactgatctcttagaagatatggttataaagctttattctaaaggtgtaaccactagagaaatagctaatttgatcgaaaaaatgtatggcagtcattatagtccagctcaagtgtctaatatctctaagcaaatgattcctaaagttgaggcttatcacaagcgtaagctgagcgataagttcttttgtgtttatcttgatacaacgtatataccgttgcgtcgagaaacttttgaacgagaagcagtatatattgccattggcatcaagcctaatggtcacaaggaagttatcgactactgcattgcgcctagtgagaatattgaagtctggacggcgttgctccagaacatgaaatctcgtggtttaaagcaagtagagcttttcctttcagatggcgttgtcggcatgaaagcagcactggcaaagacctatcctcaagctcatttccaacgctgcttggtccatgttatgcgcaacatctgcgctaaagtacgcgtggacgatcgcgaggcaatcatgaacgaattcaagcagattcaccagcaagccaataaagcggctgctgttgatgtattgcatgctttttatgccaaatggaacaagagctacaatcgtgtcattagaaacctgaaagacatcgagccagacctgcttgttttttataattatcctaagcagatcagggcttcaatttactctaccaacatgatcgaatcctttaataacgtcattaagcgcaaggctaagcctaaagcggagttcccgactgaacagtcgcttgatacttttattggcatccaagcaatgagctacaatgaccgctacttcaaccgaattcacaaaggctttggtcaagtccaggataccttagaatcctattttgaataaataaaacgttaaaaaaacaatttacgagaaagatctatttacacaaaaaatttgacagtttcgataacttatttaatgaattaaataaatcattttttaatgatgataatggtaatactcgctattacttttcatcaaattctgctaaccctcaaactgtgcaacaaattgaaaaaccaaaacaaaaagaaaataagattggccgagatttagttaaagaggctaaagataaaaagtttgatccagtaattggtcgtgatgaccaaattaatgctgttattgagattttgagtcgtagaaaaaagaataatccagttttaattgggccggctggtgttggtaagacttcaatagttgaaggcttggcacaaagaattgctagcggtgatgttccagacaagttacgcaagatgcatatttatgagcttaatatcaatgacatggtagcaggatctagcttacgtggttcttttgaagaaaaaatcaagaaggtaatagatttagcccaaaaagatccaaatacaatcctatttattgatgaattgcacaatattgttggcgctggctctactgattcagaaaataattctggagatgcagctaacattttgaaacctgctttagctagtggggatttaaagttgataggtgcaactactacaagtgaatatcgtcaaattgaaaaggatcctgctttagcaagaagatttcaagctgttgatgttccagaaccaagtggagaagtaaccgttaaaattttgcaagggttgaaaaagaaatacgaagaatttcaccatgtaaaatatagcgatgatagtttgaaattagctgttgagttatcgcagcgttacattcaaggtcgttatttgccagataaagcaatagatttaatggatgaagctggagctaaaaagagtctgggagttgattctactgatgaagatagcttaaaacaaagaattcatgattatcagctaattaaagatgaagctgctaaggctgaggattatgataaggcaagtgaatacaaggataaaattagtaagcttgaagagcagcttaagcatacagataaagcaaatgaaccagaagtaacggcaaatgatatttatgctttaattgaacaaaagactaagattccaatgagtgaattacatgctgatgaagctaagaagaatttagatttagctaagaagcttaagaatgtagtaattgatcaagataaggcgattgatattattacagatgcaattgcaagaaaacaggtctttaaagatgcaaatcgtcctactggttcattcttactaacgggtcctactggagtaggtaagacggaacttgctaaacaattagctaaagaattatttggtggcagtgatcatctgattagacttgatatgagtgagtatcaagatcaaatggctgttaataagttgataggatcagctcctggctacgttggttatggagaaggtggacaattaactgaaaaagttcgtcatgaaccatatagcttaattttgttagacgaaattgaaaaggctaatccacaagtcttcaatgctttgcttcaaatcttagatgatggacggttaactgatgctcaaggcagaaccgtctcattcaaagatacaattatcataatgacttcaaatgcaggcttttcagataaagtattgaaagatggtgaagttgataaagatgccttaattaaggctctggaactttactttagaccagaattcttgaacagattagatgcaattgttccatttaaccacttgagtagcaaggatatgaccaagatttgtgaattgtacttacaaaagatggaaaatacattagctaaacgcaacattaagatgacaattagtgatgaagctaagaaagttttagctaagagaggttatgataagaagtttggtgcacgtccacttagaagagttatggagcaagatttacaaactcctgcagctaagttaattatgaccgaacctgatttgaaggcagttgactttactgctgatgaaaaacacctttacttaaatggaaagccaattgttgatttagttgcttaagataaattttgagtcactccaaaaggagtggctttttctttttaaaaaatttaaagagggggtagactattagcaaggaggaaaaaacatgcagattgaaaacattcaagcatttgcccataaatatttagataatgatacaacaggtcatgactattggcatggtaaaagagtcgcaaatttggctcaaaaattatttttgcaagattatcctagagtatcaaaaaggcaactagatttattattagttatgggctattggcacgatacaattgatgaaaaaatatgctcaaatcccggaaaagttactgatgaaatgaagcaattacttgaaaaagaagaatttagacaagatgaaatatctagtgttttatttgttttaaatcatatgtctttttcaaaaaatttagaacattattttcaattaccaatgattgggcaatacgttcaagatgcagatcgaattgaagcacttggcgctatcggaattgctagagcatttgcttttggtggcagtcataatcaaaaaatttatgatccagcaattaaaccacaaatattaaaaagtcataagcagtatcggaatcacgaagctactacagttaatcatttttatgaaaagttatttcatttagagcagacgatgaatacaccagcggggagaaaaattgctcatgagagaactttatatatgcataagtttattgaccaattcttaaaagaatgggaaggagaataagctttttatttgacagaacttaattttttcctataattaacaacaaactgtgaacaaaaagtaagtgaggaggaggaccatggacaagccaattattggtatctcaggttcagaaattattgataatggtggaatatttcctggctatcgacgtagttatgttaatgaggactatgttgattctgtagtaaaaaatggtggtataccatttattattccttttactgaaagtgatgaagtaattaaggaacaattgaatcatgtacaaggcttgattttatcaggtggacatgacgttgatccacatttatataatgaagaaccattgcaaaagctaggggcaatttggccagagcgggatcattttgacatgttattacttaaattagcagaggaaaagggaatacctgtattgggaatttgccgtggctttcaaattattaatgtttttcatggtgggtctttatatcaggatgtatcttatcgaaaagaattaactttaaaacacgatcaaggatctaaacctgatttacctactcattctgttgatgtaatgtttgatacacatttagccaaagtattagctgaagagaaaattttagtaaattcatttcatcacttgttagttaaaaatccaggtccagatttggttgtttcagctaaagcttctgatggagtaattgaaggacttgaaactaaagatggacaagtaatgggcgttcaatggcatccagaaatgctgcataataatgaacatgtttcttatcaaaataatttatttaagaatttaatcattaaagcaagtaaatagggagaaaagtttgatgaatgatagaagagaaagtgacaaacttggcttttggtcaatagttttgttagcgattaattcaattattggctcaggaatctttttaacaccaggtagtgttgtttcaagagtaggaagtaaggctttgctagtttacctaatcgcagcaagttttgcagcaattttagcaatcacttttgcagcagcggctaaatatgtaactaagtctggcgcagcttatgcttatagtaaggcagcttttggcgaaaatgttggtttttatatgggggtactacgttacttttccgcaagtgtagcctggggggtaatggctgtagccgttataaaatcaacaatttcaatttttggtggagatccaaatagcttccagaatgtatcaattggtttcgttgttttaatgttactgatttgggttattaatttatttggccaaagcacagttaaatatattatgaatttatctacgattggtaaattattagctttagggctagtaattttagcaggggcatttttattactatctactggtgaaaatcattttggtgaaatagatactttacaagtagctggtaaaaatgttgtcccagctgtaacaacaagtagctttgtaatggctattgtgtcagctttctatgcctttacaggatttgaggcaattgcctctggttcagaagatatgaaggaaccttctaaaaatttacctcgagctattccattagctattttaattattgcattagtttatattggcgttgtcgcagtagctatggtacttaatccacgtgaattgcttgaaactaagcaagtagttgctgttgcagcaattttttcaagccctattttacgagcaattattttggttggtgccttggtatctatgtttggtattaatattgcctcaagctttcatgcaccaagaatcttagaagcaatggctcgtgaaaatcaatttcctaaatggcttgctaagagaacaaaaagaaactttccagcaagaacttttttaattactttaattttagcagtgcttgtacctatggcatttcattattcaactgataatctaattattttaagtgcgactgtgagatttttaggctttattgttgtacctcttggagtaattaaattctatcttggaagaaatgtcgaaccagtcttgactactaatagaaataaaataactgatttgattttcccaatcttttcaattttgattacactatttttactttataagtatgattgggcagctgaatttagtgtgactattaatggagtaaccagtttgaattggtttgctattggagcactaatttttggagcagttattttgccagcaattttatttgttttaactaaaaatgaacgtaaaaaagctgaaacaatgttagaaaaataaacattaaaaaagaagacacttcatgagtttaaaatccatggagtgtcttttttgtcttgcttttaaaaaataaaacagttaaaatctatctaattgcgtaaaaggcataatcatagtgagaggggtattttaatgaaccaaaaggtaaaatggtctattttggcggccgtagcttgtgtattttggggaatttctggattatttggtaagaatctgtttaattctaatccactgataacacctatctttttgactaagattagaatggttattagtgggataattattttactttttgcggcaattaccaagcaaaagcccttcgctatttggaagaataaaaaagatgcattaaatgtagcagcctatggtttattaggtctggtaccagttcaacttttttactttatagttgtgaaagaagcaaatgcgtcgattgctactattttacaatttgtaggtccattttttgtaatattttggatgctaataactaagcaacaagtttatcgtaatttagatttaatttctgctacattagcttttttaggggttttcttgttagctacacatggaaatttacaaacccttactttaagcccaggagctttactttttggaatgttatctgctgttggtgtagcaactaatactttgattcctaggagactggttagtttatatccgacggcagtaataactggttggggtttattaatagctggaattgctttattcatattaaatccaagtgtacctaaaatttcaattacttttgggatgataactgatttatcaggagttatagtgattggaactttgataccatttcagtggatggcaggagcattaagatatattagcccaagcacggctagcttattagatgcttttgaacctattagtgcgatgattggaagcattttagtatttaatctagcattaactccaatggatattattggttcagttataattattggggctgtattattagtaagtttgaatccaccaagattaacaaaaaaagcgcatcgttgatgcgctttttattttacgttaaatatcaccgttcataatactgcttttgacaattacatagtcaactaagcgaatagattgcaagttcttaccaccagcataagaaatggatgattgtaagtcttcttgcatttccttcaaagtatccttgattgaaccacggtaaggaacaagtaattgtttaccttcaacgttatggtggccacctttttggacttcagaagctgagccccagtattgcttgtaaactttgccgtcaattttgatgacgttacctggagattcttcatgacctgcaagcattgaaccaatcattaccatacttgcaccaaagcgaactgacttagcaatatcaccgttatagcgaataccaccatctgcaataattggcttgcttgcagcttttgaacacattctaagagctgctaattgccagccaccagtaccaaagccagtttttagcttagtgatgcaggctctaccaggaccaacacctactttagttgcatcagctccagcattttcaagttcacgaactgcttcaggagtggcaacattaccggctgttaagaaactatctggcatcttatctttgatgtacttaatcatcttgatgacataatcagagtgaccgtgagcaacatcgattgtaatatattctggaattaagtcttgctttactaattcgtcaataaaagtgtattcttcatccttaattccaacagaaattgaagcaaagagctttttatcatgcatcattttgataaaatcagctcttttttcgggctgaaaacggtgcataacgtagtaatagtcgttttgtgctaaccaaattgcgagttgttcgttaataacgctttgcatattagctggaacaaccggtattttgaatgttcggtttccaaacttaacagaggtatcagcttctttccgacttttgataatgcacttattaggcactagttgaatatcgttataatcaaaggcttccatactaaaatagttgctcataaaatagctcctttatttttaatccgctagtaactatacggataaaaaatcattttgtcaaacaaaaacctaaacgaatttgcttttataaaatataaagttcgtattttgattgacaaaaagtaatcgctttgctagactgtgaaggtaattgtgttaaaacgtatgaggtgattttttatgacagttgtagcagttgttggtagccaatggggcgatgaaggaaagggtaagattactgactttttgggacaagatgcagatttaactgtacgtgctaatggtggtaacaatgcaggacatacaattgtttttagtggccatacttttaagatgcgtttaattccatctggaatttttgcggcaaaaaaggctgctgtaattagtaatggggttgttattaatcctgaagttttactaggggagttaacttatttacaagaacatggtgttgacacttctaacttaaagatttctaaccgggcacacataattatgccttatgatattttgcaagatgtttaccaagaagaagctaagggtgcaaataaagttggaaccactaaaaatggtattgggccaacttacatggacaaggcttcaagaattggtatccgtgtttgcgatttattagaaaaagatactttagctgaaaagttacgttttaacttggtcgaaaaaaatgccatctttaccaagatttatggcaaagaggcactagattttgatgaaatttataacaagtatttagaatttggccaaaagattaagcaatatgtggctgatacttcagtagtagtaaatgatgcaattgatagtggtaatcaaatcctctgcgaaggtgcacaagggataatgcttgatattgatgaaggaacttatccatttgtaacctcatctaattcaattgctggtggttttgctagtggaattggaatcggacctaacaagattgatactgttttgggaatttgtaaggcctacacgactcgcgttggggctggtccatttccaactgaacttgtaaatgaaactggtgattatattcgtgaagctggtcatgaatatggtacagttactggtcgtccaagaagagtaggctggtttgatactgttgctttacgtcatgctaagcgcgtctcaggaattgactgcttgtctcttaacttgcttgatgttttaactggacttaagacgattaaaattgcgacagcttacgaattagatggtgaaaagattgactattatccagcaagtttagctgaacttgaacgctgtaagccagtttatgaagaaatgcctggctgggatgaagatatcactaaagctcaatctttagctgacttgccagaaaatgcgcgtaagtacttagaacgcttagaagagttaactggcttaaaactagccacagtttctgttggaccagaccgtgaacaaactatcgtaattaagaatccatggaattttaactaatgattgaaagatatactcgccctgaaatggggaaaatttggacagatcaaaataaatatcaagcttggctggaagtagaaattgcagcaactaatgcttggagtgaagtgggcgaagtcccagcagaagatgctgaaaaaatccgccaaaatgctagttttacagcagagcgtgtggctgaactggaagcagtaactcatcatgatgtggttgcatttacgagaacagtctcagaaagcctagggacagaaaaaaagtgggttcactttggcttaacttcaactgatgttgttgatactgctcaaggatacttgttaaaacaggctgatgagattttacgccaagatttagctatggtgaaaaatacaattgctaaaagagcacttgagcacaaaaacaccgtaatgatggggagaacccatggtgtacaagcagaacctacaacttttggcttgaagcttgcgcgctggtacgctgaaattaagcgtaatattgaccgttttgaacatgcagctagcggagttgagtctggtaaaatttctggggctgttggtaattttgctaatgtgccaccagaagttgaaactagcgtgttaaagcaattaggacttaaccagcaagaaattactagccaaattttacctagagacttacatgcggaatatcttgcaagcttagccttactagcaactagtattgaaaattgggcaactgagattcgatcacttcagcgctctgaaattcatgaagttgaagaacactttagagcaggccaaaaaggctcaagtgccatgcctcataagcgtaatccaattggctcagaaaatttatgtggcttagctcgggtagtgcggggacacatgattactgcctatgaaaatgtcagcttatggcatgagcgcgatatttcacattcatcagctgaacggatcattttaccggatacgacaattttgcttgattatatgcttaatcgcttcaaccgcatcttggcaaaccttgatgttttcccagaaacgatgctgaaaaacatgaacagaacttatggcttagtttattcacaaagactacttttgaagttaattgatggaacttctttatcaagagaagctgcttatgatatggtacaaaaattaactgccaagtcctgggatgaacaaaagcagtttaaagatttagtcttaaatagcccagttatggactatttatcaaaagcagatgttgaagatgcctttgattatcattattatttaaagcatgttgacgatatctttaaaaaggttggcttagaataaaaaaagaccgttaattcatttaagtgagttaacggtttttttatttattcagttacattttcttggtttgctaagcgtttttgatgccaggttaaaatcatttcaacaattgcattagccacgttaacattttttaatagaggaccatgagagtatgaaccgatgaagttacggtagcgtaaaccttctgctttatcttgagggttgttaccataaccttcaatcattctacctaaaggatgtaacttatcagtattatcaaagtaagtttggccggaatgattttcaaaagccaccacttctccccattcagtcatatactttgtgtcgccaatcatacgcttgtctgatttaaagacggtatgaagtgggaaaattcctaatcctttaatagttacacctgaattagttttgtagtagtctcccatgaattggtatccaccacaaatgcaaagcattggatgtccagcattaatatatttttctaaagtatctttatggcgaggaatgtctttcgcaacaactgtttgctcgaagtcttgacctccgccgaaaaagacgaaatcatagtcaaaagcattaaattcatcgcctaaggaaatattgtcaacttgtgtatcataaccttgacgttttaataggaagcgtaaaatcttaacatcgccactgtcgccataggtattcatcaaatcttcgtataaatatgcaattttgattaatttatcagtcattgttacactcttttcgccaaaattcttcaatatataagtataacctaaaatgttaatttagtttatcttctgctgcccaatgattaattggcccccattttgaaccaacgataattggatgagaaatagcttcataagtaaagtcttttgctattttaactgcatcgattaaattagttcccttagctaattcagcagtaataacagcagaaagtgtgtcaccagtaccattaacccgttcagtttcgtaatatggcttggtaaatttatggacttggccatcttctgttaataaaatatcgacgacttcgctactgtcaccagtatgttttcctttcattaagacattttttgcacctaagtcttgcaactttttcgcaccaactaaaatttctgcttcagagtctaagggaagttcagttagttttttttgttcataataattaggagtaatgatgtcagctaatggtaatagacgatttaaaaaggtttgataagcatcatcatctaataagctgttaccatgtttagtaataataacggggtcaataacaaccttacccatatcatatttttctatattatcagctacacaattaataatttctttattagcgagcattcctgtttttaaagctttaattgaaaaatcatcatttaaaacatcaaattgcttttgaataaaatcaacaggcataatttgagcagcataaatcccagttgtgttaccagcaacagctgcggtcattaagcccattccataaacttttcgggcataaaaagcgtgtaaatctgctggcatcccagcactaccatcactatcgttgcctgcgatggttaaggcgataatttctttttttgacatagtaatatcctttcatttaaatagagtataacttaaaataaagccagcttctatcatattaacttgtaaatttactaaaaaactttaaaattctaataagagaaaacgcttaagttttaggagtgaaaatatggttgaatcatatattatggcgattgacgaaggtactacttctaccagagctattatttttaatcatgctggagataaagtttatgtagcacaaaaagaattcccacaattatttcctgaaccaggttgggtagagcatgatcctgaacagatttggaatgctgtacaaaccacagtagcttcagctttcatcaattcacaaattcggccagatcagatagcagcaattggtattactaatcaaagagaaactaccgtaatttgggataagaaaacaggtcgtcctgtttataatgctattgtttggcaatctcgccagacaacttctttagccgaagaactaaaaagcaagggttatagtgacttaatcaaggaaaagacaggtttaattattgatccatatttttcagctactaagattcgttggattttagatcatattgaaaatggccagaaaagagcagaaagtggagatttattatttggcacaattgatacttggttagtttggaaattaactaatggtgcagtgcatgtgacggattataccaatgcctccagaacaatgctttttaatattcatgatttaacatgggatgaagatattttaagaatactgaatattcctgagcagatgctaccagaagttaagagcaattcagaagtttatgggcaaacgacaccttttgaattctttggtggtagagtgccaattgctggaatggctggtgaccaacaagctgctttatttgggcaattagctttaaaaccaggaatggtgaaaaacacttatggaacgggttcatttattgtgatgaataccgggactaatcctactagttccaacaataatttattaacaacaattgcttataaagttaatggacaagtagtctatgctttagaaggttctgtttttgttgcgggtagtgcaattcagtggttgcgggattcaattaaattaataaaaacttctcctgaatcagaacaagctgctcgcaattctacctcggaaaacgaagtttatgttgtaccggcttttacggggttaggtgcgccatattgggatgcggaagcacgtggagcaatttttgggataacgcgaggcacaacagataatgatttaatcaaggcaacgctacaatcattagcttatcaaacaagggatgttgtagatactatgcaacatgatagtggtattgccattcctgctttaagagtagatggtggtgcttctaataatgattatttaatgcaatttcaatctgatatcttaggaacaaagattgaacgtgctgcaacgctagaaacaactggattaggagcagcttttttagctggtttaagtgttggatattggcaagacattgatgaattaaagaaaattgcaaaaattgggcaaacatttagcagtgaaatgacaaatagtgagagagataaattatatgctggttggcaaaaagcagttaaagccacccaattttttgctcattaggagtttttagcttatgaaattaattaaattggaaggtgcaactaattttcgcgatttgggtggatatgtaggactaggtaataaaaaagtccgctatggtaaaatttatcgtgctgattcattgagttctttgtcacgtgttgatattaaaaagttaaatgaattaaatatcgtttatgactgcgacttgagatcccattatgaacaagaaatggcacctgataaagcatggaaagcagaatttatagattgtcacttatatgctgaaagccctgcagagcacgtagataaagcaattttgactaaattaataaagaatataaagcctatggataattatttaggccaaatttatcaaaaggttctattaagtacacatggccagaagatttttaaaactgtttttgagaaactgcttactttagaaaatgatcaggctttggtttttcactgttctgctggaaaagatcgaacagggatgatagcagcgctaattttaatgggattaggagttagcgatgatgatataactcgtgactatttggttactaatcgtctttatcatttctcatatcaaaaaaatcagccaagtgatgatgagatggctaatttagtagcagagatgaacttaaccaaagctgatagtgcaggtattaaaggcattactgaaactatcaggatgggctggggaagttttgataacttctttattcatgttcttggctttagcaaagatgatttacaagaaataagaactaaattcttggaggcaaaataatggtaactctttctgacgtagctaaagaagcaaatgtttcaaaaatgacggtttcacgggcgattaaccatcctgagcaagttacgccagaattattggccttagttgaaaaggcaatggctaaattagactatcatcctaattcaattgctcgagcgctagttaataatcgaactaacgttattaagtttgttactttagaagatattgatacaactgagccgtactatatgaatttgttgtttggtgttgcacgcggcttaaaggcagatagttatgcaattcagttagtaactgatattgatcaaattcaaaaaggtaacgctgacggatatattattactggcgcgcgtgaatacaattatccaatttttaatgaattaaagaagccatttatcttttttggtgaaacttcaagcaattttgactttgtcgatactgacaatcgttatggtacttcagttgcgactaaatatgctttagagcgcggttatcaagatgcagtctttatcgggattgacgttaaagaaggttttgagtatgcgcgtgaatatggctatttggcaagtatgcaagaacgcaatttagaacccaagatttttagaacagggaatcactcacatttagctgaaaagttgattgatgagcagattgaaaatattaagccgaatacctgctttatttgtgctagtgatcgcttggcaattggggtatgtcgggctttgtcacgtttaaataagaaattacctgaagattatggggtaattggttttgatggtgtgtttttagatcaagtttccaatccacaattaaccacagttaagcaacaaatctttaaaatgggcgatatgttagcacaattgattctggagaagattaagcaatctggttctgcgcaagggcagacctatgtgaagccggaattggttgtgcgtggcacgacaaagtagggataaaaggataagctaaaagatttgattaaaaaatctaaaataatactcttcaaaagggtgtctagtaaaaaaaactaggcacccttttatttttgataccgataacaactgtaagcggttactttgatttgttacactagcaacaggaggacacgcttatgaaaaaatggtacgacgaagcaattatttatcaaatttatcccaagtcctttcaagacagtaataacgatggaattggggacttacaaggaattaaacagcgaattccatacttaaaaagactaggaattaacaccgtttggcttaatccggtctttgtttcgcctcaagtagataatggctatgatgtagctaattattttgcaattgatgaaaagatgggcaccatggctgatatggaagacttaatttcagcccttcatcaaaatggtatccgcatcatcatggactttgtattaaatcacacttctgatcagcacccctggtttaaggatgcaattgctaatcctaagagtatttatcgcgattattatctctttgctggagaaaatggccatcggcctaacaactggggcagcttttttggtggtagtgtttgggagccggatcccaaaactggtcaattttacttccacttgtttgataaacacatgcctgacttaaattggaaaaatccgggcgttcgtaaagcgatgcttgatatcgcagaattttggcttaaaaaaggaattgatgggttacgcttagatgcctttatccatattgccaaggctgattttcgccaaaattatccagcccctgaaggccaaatacctgtagctgagccattttttgctaacttgccagaagtagttcattatttgcggccattttgccagcaaattaagcaagattatccagattgcttattattaggcgaagctgctagtgccaatgtgaatttagctgctaattatactgatccggaaaataatttactagatgctgcaattactttccgctgctttactgaggatgacagtcaacttgattcagctattccagccaattatcaagttaagccctttgactttgaagcatttaagttaacccaaatgatttgggagcagactttagcaggaatttcaaagccagttctttactggagcaatcatgatatgagccgtttgcggacgcgaattgctaaaaatgacctgcaagctaaaagtttagccatgcttctatatttagagcgaggtattccaattatttattatggtgaagagttagggcttaagaatttagccttccagcaattggacgactttaaagatcagactgtttttgactttgccaaaaaggcagaaaagcaaggatatagtgaagctgaaattttaacgatggtttcgcaaactcataaaatgccagctcgtggagttatgccttggaaaaaagcagaaaattatggctttagtaagcaccatccttggctaactggtaaaaaacaggatgagcattttgcggaagctgaaatagctgattcagagagctttttcaacttttatcgtcagctgattgcgttaaagaagacgccattatttatggaaggtagttattaccttcacccaactagcagtaagagctttatttatcagcgtgatttgggcgatgaaagtgccttagtggtagttaacttaactaataaaccattaaaagtaaaaaccaaatatcaaaaagtcattttgagcaatggccaatatagtttaaatgacaatgaattacaactagcaccatttgctggtttagttttagaaaggaattaagatgcaagaagcaagtttacgacaccgaccagaaagtgaagattgttttttaattgataaaaatcatcttcgtctgcgttttcatactgcgaaagatgatgtgcaaaaagtaattgttcattatttagatagttactatgatttaaaaactgcccaaaaacaagaaatgaccaaaatcggtagtggccaagtggcagattattatatgacaacgctcgagttacctttacaccgctgccaatatacctttgaagtagttggccaagacgacagtcacattatttatggagaccgaggaattcgtgaatacaatgacagtaacttatatgattatggtcaattctttaaggtaccatatttccacgaaattgacatggccaaaacgccagcttgggttaaagaaacggtttggtaccaaatttttcctgagcgctttaataatggcgataaaaataatgatccagttgggactaaaccttggaattcagccgatcaccctggtagagaagattactatggtggtgacttacaaggggtattagacaagcttgattatttacaagagctaggaattaacggcttgtacttctgtccaatttttaaggctagttctaaccataaatatgacactatcgattatttagaaattgatcctgattttggtgataagaagctatttaagaagttagttgatgaagcccataagcgcgggatgcatgtcatgcttgatgcagtctttaatcatttaggtgatcaatctaaagaatggcaagatgtggttaaacatggtcgagattctaaatactttgactggttccatattaattatttgccagttactccatttaaagatccaagtaagggtgaggagatgccaccttatgatacttttgcttttgaaccgcatatgccaaaactcaatactgctaatgaagaagtacaaaagtatttattaaatattgcaacatactgggctaaagaatttcatattgatgcatggcgtttagatgtagctaatgaagtagatcatcatttttggaaaaagtttcacgtgaaactcatggagataaatcctaatttttacattgtgggtgaagtttggcattcaagtcagccttggcttaatggggatgaatttactggagttatgaattatccatatacccaacaaatcgaagaccatttcttaactggcaaaattagtgccaaaatgctaacgcaagttttatttgaccagctgatgctttatcgtgactgcgtcaacagtggcatgcttaatatgctagattcacatgatactgccagacttttaactttagctgatgaaaaccaagacaaagcattaaatgctctagccttcgaactcatgcaaccaggtagtccatctatttactatggaactgaaatggcgatgactggtggtaacgatccagattgccgtaagccaatggattggacaaaaacaggaaatgcatactggcaaaaagtccatgcattaatcgtatttagacgtaagtatgcatcagttttaagtcaaagtgatattaaacttgcagttgaagatgatttgattgtggttaagcatggccgaattactgcatatttcaatactactaattatgaaataaaaattgataaaaaagccagtgtaagtaatggctatcaaaatggtgttttaagtccaaatggctatattttatgtgaatgatatcggtaacaagaacctgataccggtaacaaagcttcaagctattgtaaagcgcttacaaataacacacaatatagttagttaaaataaatcaccagaaagtggtggagaatgatgaagagaatttttgaaattaatccctggaatattactagtcacaattttccaaaagaagatatgcgtctagctgaaagcattacttctattggaaatgactacatggggatgcgtggaaattttgaagaaggttatagtggagatagcctatctggcacctatctagctggggtttggttcccagataaaactagagttggctggtggaaaaatggttatccagaatactttggtaaaagtcttaacgctcctagctttatcggaattcaaattttagttgatggagaaaaagttgatttagcaaagtgtgacttttctgactactaccaaaatttggatatgcatcaaggcttgcttactagaagttatatttaccatggcaaaagtaatatcaagtttacttttgaacgttttttaagtaataagattcaagaagcagctttaattaaggttaaagcacaagtattaaagggtagtgcaaagcttgaattcattagtactttagatggcaacgttgttaatgaagatagcaactatgaagaacatttctggaagccaatacttgaagatgaaaaggaaaagtgcatccaattaattactaaagaaaatcctttccaagttccgcaatttacagttttgcttaagcaaagcttacgagtaaatggtgaaaaggttcatggcgaagttgaaactaaagcaggctatttagcagaaaaagttacaactatgcttgatgctggtgaaaaatatgaacttgaaaaagatgtaattgtcattactagtcgtgatgtggctccagatgaacaagcagagcgagcagatttattaatgcatgagctttgtgagcacacattttcagaaaacttagctgaacatgaagcaatttggcaaaagcgctgggaaaagagtgatgtccaaattaaaggctcagacgaagcgcaacaaggtattcgctttaatattttccaattattcatgacttattatgggcaagatgctcgactcaatattggccctaagggctttaccggtgaaaagtatggtggtgctacttattgggatacagaagcttatattattccaatgtatttagcagttgctcccaaagaagtaacgcatgccttacttgaatatcgtcataagcaacttccaggtgcctatcacaatgctaagcaacaaggcttaaagggtgcactcttcccaatggtaactttcaacgggatagaatgtcacaacgaatgggaaatcacttttgaagaaattcaccgtaatgccgatattccatttgcgatttatcagtacaccgaatatacgggagacgaaagttacgttcaagatgaagggatggacgtcttagttggaactgctagattttgggctgatcgggtacatttttcaaagcgcaagcacaagtacatgattcatggcgttactggaccaaatgaatatgaaaataacgttaataataactggttcactaaccaaatggctgcttggcttttatcctacacccttgaaagattgcctaaggcaaaactagaggcattgaagcgtttagcagtaagtgacgaagaaaaggctcactggcaagatattgttgacaatatgtacttcccagaagataaagaattaggcatttttgttcaacatgatacttttcttgataaggacatccgaccagtaagtacgattcctgcaagtgaacgtccaattaaccagcattggtcatgggataagattttacgttcaccatttattaaacaagccgatgttttgcaaggaatttatttcttgaataatcacttcacaaaagaacaaaaagaaaagaactttgacttctacgaaccactaacagttcatgaaagttcactcagtgcatgtattcacgcaattttagcggcagaacttggtaaacaagataaggcagttgagctttatcaaagaactgccagattagacctagataactacaacaatgatactagtgatggcttacatatcacatcaatgtcagggagctggctagcaattgtacaaggttttgctgggatgcgctactacaatgacgagttatgttttaagccatttgttccaagtcagtggcaaggatatagctttaagatgaactatcgcggacgcttattagaagttaatgttagcgatgaaattaaattaagactaatttctggtccaagtctcaaagttaaggtttatgaccaagaagttttgctagaagaggggcaagaaaaatgcttaaaggcttaatttttgacctagatggcgtaatcactgattcagctcgttatcacttggctgcttggaatgccttagctgaagagctaggaattaagttaccagctaaagccagcgatgagttgcgtggactagcaagaatggattcgcttgaattaattttgcggtatggccaccaagaaaataaatattcattagcagaaaaagaagctttagcagctaaaaagaatatggcttatcaacaagcaattaaaaagatgacccaagctgatattttacctggaatttcagaattgctagagcaagccaaaactaatggtttaaagatggcaattgcttcagcttcaatgaatgcacctactattttaaagcaattaggattgttaaaagagtttgatgcagttgttgatcctaaaactttaagtcatggtaagccgaatcctgaaatttaccaaaaagcgcaagctttactagaccttgaagctgatgaagtaattagctttgaagatgcagcaagtggtgtagcagcaattaaagcagctaagcaatttgcagtaggaattggtgatagccaggttttaggtcaagcagatttagttgttagcgatactagtcaattagacctgacaaaaattgtggcaacatttaaaagtaagaaagtaggttaatgcaaatggttgaaatcaatttaaaccatatctataaaaaatatcctgatgcagaaaattattcagtaacagactttgacttacatatcaagaatcaagaatttattgtttttgttgggccttctggttgtgggaaatcaacgactttaagaatgattgccggccttgaagatatcagtaagggcaccttggaaattggtggcaaagtcatgaacgatgttgcaccaaaggatcgtaacattgcgatggttttccaaaactatgccttatatccccatatgagtgtctatgacaatatggcttttggcttgaagttgcgccattattcaaaagaagaaatcgataaaaaagtcaaaagtgctgcagaagtcctaggcttagcgcacttacttgatagaaagccagcagctttatcaggtgggcagcgtcagcgtgttgctttaggacgtgctatcgtacgggatgcgccaatctttttgatggatgaacctttaagtaacctcgatgcaaaacttagagtgtcaatgagagcagaaattgctaagctccatcaaaacttaaagacaacaacaatttacgtaacgcacgaccaaactgaagcgatgactttggctgaccgcatcgtcattatgtgtgatggtaaaattcagcaaattggtactccacaagaagtttataatcacccagttaaccaatttgttgccggctttattggttcgccacagatgaacttctttgaagttacttatcaagatggcaagattagtgataataagggactagtcttagaagtgccagaaggtcgcgcaaagcaacttgaacaagctggctacaatggtaagaaaattattttcggaattcgtccagaagatattcattcagaaggggcctttcttgaaacttggcctaagagtgcagttaaggctaaagttgttgtttcggaacttttaggagcaactagtcaactttatttaaatgtcgatggaactgagtttgtcggaattgtgaatgccagagacttccattcaccaggtcaagaagtaaccgttggttttgatgttaacaagggtcacttctttgatagtgaaactaagaaagcaatttttaccaattaatgtaagcgcttgaaggaggtgctgcgaaaatgacaccatggtggaaaaatgcggttgtttatcaaatttatcctaagtcatttcaagatagtaatggtgatgggataggagatttgaaaggaatcattagccgcttagactatttagaaaaattgggtgtagatgcaatttggctctgcccaatttataaatcccctggtgccgacaatggatatgatattgcagactatgaagcgattgatgagcagtttggtacaatggctgatttagataagttaatccaaaaagctcgccagcatcacattcggattgtcatggatttggtagtaaatcacacatctgatgagcataaatggtttattgaatcacgtaaaagtcgtgaaaacccgtaccgcgatttttatgtttggcgagataagccgaataagttaacttcagctttttcaggtagtgcttggcaatatgatgaagcaactaagcaatattacttacacttatttgctaagaaacaaccagatttaaactggaaaaatccaaaactccgacaaaagatttatgacatgatgaatttttggattgataagggaatcgctggtttccgaatggatgtaattgaatgtattggtaaagaaccagaccaagaaattacagccaacgggccacacttacatgagtatctacaagaaatgaatcgtgaaacttttggtaagaaagatttcttaactgttggtgaaacttggagtgctattttagcagatgctaaaaagtatattgaccctaagcgtcacgagttatcaatggtctttcaatttgaagccaatagtttagatcaagtaggtgcaagtaagtgggacttaaaaaagcctgacttagctgaattaaaggctattttaactaaatggcaagaaaatttagcttggaacagcttattctgggaaaaccatgacattcccagagtaatttctcgcttcggcgatgatggtaaatatcgcgttgaagcagccaagatgtttgcaattatgcttcatttgttaaagggaacgccatatattttcaatggtgaagaaattggtatgactaactgtccggttgaatcaattgatgatgttaacgatattgaaagtcgcaatatgtattttgccggattagagaaaggtaagagtaaagaagaattattacgttcaattaatgctaaagggcgtgataatgctagaacgccaatgcaatgggatgatacagctaatgctggatttactactgggaaaccttggctacatctaaatcctaattatcgagaaattaatgtaaaggcttgtctagcagataaaaattcaattttttacacttaccagcaattgataaaaatgcgtcacaactatccaatgctagttgatggcgactttaaagcagttgcaactagtgacaatatctttgcctatgaaagagttttgggtgatgaaaaatggttagtggtatgtaatttaactaaggaagaagccactttcacatcagaatacaaaatccagaacgctttaattagtaattatccagcaagaactaccttacaagacattactttgaagccatttgaagcttttgcttgtcaggtaacttgttaatggacaggaggaaatgaatatgaaaatttggaaaaagttagctcttgctacagcagctttagcaatggttggtacattatcagcttgctcaagcaataagagttcatcaacaagtagtaataataaaaatcaattaactttatgggttgatactgaacaagtaccatactacaagacgattgctaaagactttgaaaagactcacaaggggattaaagttcgggttactcaaagtccaaatggatcagctaatgctaagactgatgtaggtaaagacccaagcaaagctgctgatgtctttgaagtaccaaatgaccaattaggtcaaatggcagaagcaggttacattaacccgctttcaccaactgatactaagaacatcaagaccaactatattgatgaagcttacaagggtgttgcttggaatggcaaggtttatgcatatccttacgcacaacaagctcaaactatttattacaacaagagtaaattgtcagcaagtgatgttcaagattgggatactttaactagcaagggtgttgttgcaaccgactttactaatgcatatgcaatgtggcctgtattcttcagtgccggcactaagttatttggtgacaatggtgaagatttaaagggttcaacttttaactcacaagaaggtgttaacgccttaacttggtttgctgaacaaaagaagaacaagaatgttatgcaaacttctaacgctttgaaccaattaaagaagggtaaagctgctgctattttagatggcccttggaacgctgcaaacattaagaagattttaggtaagaactttgcagttgctaaatacccaactattactgttggtggtaagaaagtacaaatggaagcattcttaggtattgaaggctttgctattaactcacacactgctaatgcaaaagctagtgctcaacttgctgcattcattactaacaagaaagctcaattaattgctcacgacaaggctggtcaaattcctgtattgaaggctgctatcaactcaagcgatattaagaatgataatgttgctgaagctgtaattgaaatggctaagtcaggtaacagtgtcttgatgcctaagatggcacaaatggctaccttctgggatggttctgctccattaatcagtggtgcttacgatggcaagattaagccagcacaatacaaggctcaacttgataagttagctaaaaagattgaaaagaaatagtaattgctaagtgagaagatgggttaacagccattttttacttcaaaaggagaaagctatgtttaagagaaaaaatcatctacctccaaaagctacctataaagaagtgtggtctaaaggagatgctataaccaaatgttcatttttcattatgggtctaaatgccttgaagcatggtcaatgggctaaagggctttctttactacttagtgaaatcgtcttctttgcttggatttgtttaactggttttagctcaatcaaagctttgtcaaatttaggactaattaagaaaaaacaagttatttatgatgctagtcaaggagtttatgttactaagcaacctgacagttcagttttaattttgttgtttggattattagctttaatggtagtaattggctttatttggctttatattgttaatcttaagagtgttagaaagaattacgtcttagaacgtgatcatgaacatattttgactaataaagaagaacttgcaaacttatttgatgaacgtttgcatactaccttgatgacaattccagttttagggatttttctctttacgattttgccaacggtctttatgatatcgatggcttttaccaactatgatcgtcaacactcaattggtttttcatggactggctttaaggcgtttggcaatgttttaagtggggatttagcaggaacattcttcccagttcttggttggaccttgatttgggctgtagctgctactgccacaactttcttctttggtgttttacttgctttgttaattgaatctaaaggtatcaagcataaaggcttttggagaactatttttgtattagtatgggcagttcctcaattcgtatcattattaatgatggcccaatttttagactatcaaggtgcatttaatgcaattttgatgaacttgcacttaatttctagtccaattcactttattgataatcaagccgctccctgggtagcaagaattaccgttatcttcgttaacatgtggattgggattccagtttcaatgctggtttcaactgctattatccaaaacttgccacaagatcaagttgaagctgccaaaattgatggtgctaatgccattcaaatctttaaatcaattacattccctcaaattttatttgtaatggctccatcattgattcaacaatttattggtaacatcaacaacttcaacgtaatttacttgttaactggtggtgcaccaatgaataacaactacaacggtgccggttcaactgaccttttggtaacttggttatataacttaacctttggacaagaacaaagatacaacgcttcagctgtcttgggtatcttaatctttattttgagtgcgactgtatcattaatcgcatatcgtcgtactaatgcatttaaggagggttaaaaatgaaatcatacgcagcacaaagaagactttcattgatcttccggtatgcattattaacgattttatctatcctttggattttaccaattgtttggattgtcttagctagtttttcttataatgataccggctttgtttcaactttttggccagaaaaattcactttgcaaaattacattgggatttttactaacccacaatatccatttggtaactggattatcaatactttaataatttcaattgcttccgcaattatttctacctttattacaatttcagttgcttatgttttatcacgcttacgtttcaaattaagaaaaccatttttacaaattgccttagttttggggatgttccccggctttatggctatgattgccctatactacatcttaaaaggtcttaacatgttaaaccttggtggtttgctcttagtttatgttggtggatcaggattaggtttttatgttgccaaaggtttctttgatacaattccgcgggcaattgatgaagctgccgaaattgatggtgcaactaagtggcaagtattctggaacattggtttaccattatctaaaccaatgattgtttacactgccttaactgcctttattggtccttgggttgacttcattttctcaggtatcattctttctacttcaggaaatgccaagacttataccattgcctatggtttatacaatatggttcacaacagtaaaggtgcctcaactacttactttgctcaatttatcgctggttgtgttatcatagcaattcctattactattttgtttatcttcatgcagagattctatgttaacggaattactgcaggtgcagataaaggataagcgagaatacattcaaataaaaatgctctatctagtcgatagggcatttttttctttatttaatttggttgaagatggttaaaaaataatgggctagatgattagcgccaatttctcttaggaaggaaatagttttgatgatcttttgctcgttaggttgattatgatattcagctagttgatttaagaagtggcgaccaataatgagctgcatatcgcgttctttaaaagttaaggtgtttaatttatccaagattttttgagcgtacttaaagttattagccttaaaaagagcaatggcagcttcaaataaagtagtaattgcaaaataaaaagtgtcgtgtccagcagcttgaataaaatctaaatattcaattacttgataacttacttggtaaatgatgcgagggctaagaacgttaataattgttcgaaaaagtgaaaggttttcttgtccccaaactgacaaatgtgagagttctttgtttaacagattctgattagaaatcgacaaaagatttttacggcttaagttgtagtataagctggcgcaaatagcagcatagtttaagtcaatgagcttttggctagtttgaaattttgctagggcagtggtagttaattgttgtagtttagcttgatcttttgttagccaggctttttctaaatcttgagaaaggtcatctggttgatttaaccctgataatgctaaaaattcggctggcgttagattaattctctcaagtaattcaactaccttttcaaaatccatcttgccttggccattttcccagcgtgagagcattgagactgagcagatgttattagcagcttggcttaaggtgatgttttgcatctttcgtagtttcttaaaagtaaagttcatttttttctccttgtttttatcatatatgcaaaaagcagaaaaagctaagaattgattttgctttaatgcaaataaagatataaggaggagtcaaaatggccaaacaatctaaaaagcaactcctattagctgtttcaagtttaggaatgggtaatttagctagttcaattttttctttttgcctgagcctttatactttacaaaaaactgggtcaagcttagtgttttcaacaattttgttaataaatcccgtaattaagcttttatttacaccattagttggttacacagtagataaatatcatcacaagaaaattgctattggagcgcaactagtaagtattgttttagatgtgatttttctaagtttaattgaattactaagtttgaatgagcaaattttattaattgctttagcagtaattggtttatctttagccgattgttttcaggaaacaagctataaggcttcaactaagtcatttgttgctgaagaatattgtcaaaaattaattggctatgaacaagttgttacagcagggacggcaattttagctccaattttaggtggggtagtttttagctggctagagcttaattgggtgactatcattgaattaattggagaagtggtttcgctactattaattagtatgattgatttttatctggttgagcagcgccaaagtagtcacttatcttcaataaaagaatcatttaaagctggtatcaattatattagacaagataagaacttgttagacctattactttttgcggtatttgctaatttctccttaggctcaattgaagtggggctaccagtaattatggtgaaacagctaaaattaggatctgaattatatggaatgactacaagttgtttagcaatggggatgctagtagctagtttatttcttagtaagcttaacttaaatggagcttatttaggatttactggaagaaatggcgtagtgttatctataatttttgctatttttgcttttattgagctggtagagaacatctatctgataacatttattttgggcttggggatgtttttaattggcggtattttaacaatgtcgaatcttccctttgcaatgtatttaagaactcaagtggcagaggactaccaaggacgagttggttcaactatgagcagtttagttagtttgttatctccaatttcttttgctatctttggtttattatttaacactttagctagtttatggatttttagtttttgcgggataattttactaattgatagtcttttcttactaaaaaataaacacacctcttagcggggtgtgtttttcttgctagcaaaaattagaattattaagaagttaagcagtaaggtaaagcctgttacccaaaaaactgcttcataattagcaaaaccagaaattccagaacctaaaagtgatcctaagaccgcgccgatagcttggaaggactggttataactgaagattctaccaaagctttcacttggagtattcaaagttaagacggtttgagcagctggcatcattgcagcactcgcaattccaagtaaaaagcgtaaagctgctaagacccaaggcgagttagtaactgccatgggtgcaaataagatggcgccaataattaagcctagccgcaataccttcaatggtccaatttcgtccattttatggccaatctttgaagcagcaatcattgttcccaggcctggcgttgccgccacaattccggcaattagggcgacatttttactgccaggcatcattgacttaacatataatgaaacaattggatcaattgacattgtggctgattgtactagcatcgttgtaatgaacattgccacaattaactgaatacttggtaaagaagccatgatttctttcattggcttcattttttcccgagaaacaggagtgaagttttctttggtaaagaaagtagttcctaaaaagaccaagaacattaataaacctgtaatgaaaaatggaatacgatagccccaagcaccacctagtaaatttccaaaaaagcttgaaagtgctccgccaagtaatggtccaactaagttaccggcagtcccagcagtcatcatctgactcataacccagccacttttttcgtgtggtgtttcaccggccatcagtgcagtcgcattgttgatataaccagaaaaagccccctgaataaagcgcataataacaatataaattgcattaggagctagtccagttaaagaaatagttaatgccattacaccactggcacgcatacacattaacttgcgccccttttggtcagctaaacttccccaaaagggtgaaacaattgcttgagctataaaagtcatagcaaatgctaaaccagagtagaggttgatttctaatttgttgtaattacctaaatctgaaataaataatgaaataaaaggcatagtcattgaatatcccattccagtgatgaagcagcccagccacagggtatagaatgaaagatgccagtttttagacaaacctgaagtatattttgacatgatttagctccttaaagtgttttatttcaagtttaacactactattttataaataaatgaagaaagagctaaattagtacttatcccttgaattttgtgctagcatatttcaaaagaaagggtgatttgatgagcgagaaaattactagagaagaatatcaaagagaaaaagtttatggacaaaaatacaaactaaatttttggaatatttggactgatcgtccttatatttctgtagcaattgttgttgctctgataattactttatttactagatggtatttaggtacaattcttattttgttaattacagcaattggaatttatattattggacatagtcatcaccctaaccgcgtcttaagtattgaatttcgtttgaaagcttcaagacagctaagtatgttaaagagtttgcagatgggtgcaagtgttttaatgtttttagctacctatatgagaaaagtagttagtgtagattttactagcgccggaactcaagatggtctgcaaacaattcaagggatgttatcaaacacaggaaaatatggacaacaaggttcatatattctaagtttattgaatactgtgacaggtggttctttttggggaacgtatcgttatgcttcaaatacttctcaatttatgaatgatcctgctggtttaatgattattttgtggatttttttgttaatggttgctccagctatttgtgtcttatccaatttctttaaagaaccatattcaagacgcgcttcactagttggtggaattgtatcattagttagttttgtcataacacctaaagtgatggattttttaattactcagtatgcacaagatcaaaatattagtgtacgaaatgcattaagtgtgggagagatggcttatgtagcaatcggttgtgcattaatggttttagtaattgcaatttatagaaactacaaaaaagataattttgaatagaaaaagccttgagtttcgctgatactcaaggctttttaagtattttagatctatatttttgagaaaaaataaaaaaagtttttagtcgattcgcagcagaaaagtcataaaaaaggaactattattaagtaataaaagataaagttcacaaaagaagagaaataaaaaagaagagaagttgacaacgtaaccaggtgttcagaaaagaagggaaataaatcgaacgaaaaggaaagtttgacgaaaaggaggaaagcctgtatagtagtatctgttctcgcgagaggttaaagaaaacactcaaaagagcaaaaataaaaacaaaaaagttcttgaccgaaaggttaagagatggtaatatattaaattgtcgtgagtcagagatgacgagcgaggataaataaattaccaagtatcagaaaaaagttcttgacaaaagcaacttgcttctgatataataacaaaggtcacttgagtggccggagttagtactttgaaaaccgaacaaagtttcgctaaagtgtgcgggtgtaacaacccaaacaaaagcgaagtcaattcgttaagcaataaatttgagataacaaatcaaaaaactgattgagctaagagctcattttaattcaaaatgagagtttgatcctggctcaggacgaacgctggcggcgtgcctaatacatgcaagtcgagcgagcttgcctatagaaattcttcggaatggacatagatacaagctagcggcggatgggtgagtaacgcgtgggtaacctgcccttaagtctgggataccatttggaaacagatgctaataccggataaaagctactttcgcatgaaagaagtttaaaaggcggcgtaagctgtcgctaaaggatggacctgcgatgcattagctagttggtaaggtaacggcttaccaaggcgatgatgcatagccgagttgagagactgatcggccacattgggactgagacacggcccaaactcctacgggaggcagcagtagggaatcttccacaatggacgaaagtctgatggagcaacgccgcgtgagtgaagaaggttttcggatcgtaaagctctgttgttggtgaagaaggatagaggtagtaactggcctttatttgacggtaatcaaccagaaagtcacggctaactacgtgccagcagccgcggtaatacgtaggtggcaagcgttgtccggatttattgggcgtaaagcgagcgcaggcggattgataagtctgatgtgaaagccttcggctcaaccgaagaactgcatcagaaactgtcaatcttgagtgcagaagaggagagtggaactccatgtgtagcggtggaatgcgtagatatatggaagaacaccagtggcgaaggcggctctctggtctgtaactgacgctgaggctcgaaagcatgggtagcgaacaggattagataccctggtagtccatgccgtaaacgatgagtgctaagtgttgggaggtttccgcctctcagtgctgcagctaacgcattaagcactccgcctggggagtacgaccgcaaggttgaaactcaaaggaattgacgggggcccgcacaagcggtggagcatgtggtttaattcgaagcaacgcgaagaaccttaccaggtcttgacatcctttgaccacctaagagattaggttttcccttcggggacaaagagacaggtggtgcatggctgtcgtcagctcgtgtcgtgagatgttgggttaagtcccgcaacgagcgcaacccttgttaatagttgccagcattaagttgggcactctattgagactgccggtgacaaaccggaggaaggtggggatgacgtcaagtcatcatgccccttatgacctgggctacacacgtgctacaatgggcagtacaacgagaagcgaacctgtgaaggcaagcgaatctcttaaagctgttctcagttcggactgtaggctgcaactcgcctacacgaagctggaatcgctagtaatcgcggatcagcacgccgcggtgaatacgttcccgggccttgtacacaccgcccgtcacaccatgagagtttgtaacacccaaagtcggtgaggtaacctttggagccagccgcctaaggtgggacagatgattagggtgaagtcgtaacaaggtagccgtaggagaacctgcggctggatcacctcctttctaaggaagcaaggtgctggagagtagagatactaaaagaaggcactgagtacggaagcacactaaagaaactttgtttagttttgagagtagtagctctcaaacattgcacgttgaaaactgaataacaaccaagaaaaaaccgagacaatcattgaacagattgtgaaagcgaaccgagaagagagatctaggtaataggtcaagaagagaagggcgcacggtgaatgcctgggcactagaagccgatgaaggacgtgacgaaccacgaaaggctacggagagctgtaagtaagctaagacccgtagatatccgaatgggggaacccggtgcagcgatgcatcattaaatactgttaaggtatttaaaggaagacgcagtgaactgaaacatctaagtagctgcaggaagagaaagaaaaatcgatttcctaagtagcggcgagcgaaagggaaagagcccaaaccattgaatttattcagtggggttgtaggactacgatgtgagacagagaggtatagttgaagtctttgggaaaagacgccagagagggtgagagccccgtaagcgaaatagctcgaagctctagtagtatcctgagtaggccgggacacgaggaatcccggttgaagcagcgaggaccatctcgcaaggctaaatactaactagtgaccgatagtgaaccagtaccgtgagggaaaggtgaaaagaaccccggaaggggagtgaaagagaacctgaaaccgtgtgcctacaagtagtcaaagcacattaaagtgtaatggcgtgccttttgtagaatgaaccggcgagttacgttaagtagcgaggttaagacagaaaagtcggagccgaagcgaaagcgagtctgaatagggcgagcagttacttgacgtagacccgaaaccaagtgacctacccatgtccaggttgaaggctaggtaaaactggctggaggaccgaacccacgtaagttaaaaattgcggggatgaggtgtgggtagcggtgaaattccaaacgaacttggagatagctggttctctccgaaatagctttagggctagcctcgcgagagaggataatggaggtagagcactgtttggactaggggcccgtcaggggttactgaatccagataaactccgaattccatatatctatacgcgggagtcagactgcgagtgataagatccgtagtcgaaagggaaacagcccagatcaccagttaaggtccccaaatctatgctaagtggaaaaggatgtggagttgcgtagacaactaggacgttggcttagaagcagccatcattcaaagagtgcgtaatagctcactagtcgagtggcgctgcgccgaaaatttaccggggctaagcatagtaccgaaactgtggatgtgcgtaagcacgtggtaggagagcgttctaattgcggcgaagcctaatcgagaggataggtggagcgattagaagtgagaatgccggtatgagtagcgaaagataggtgagaatcctatccgccgaaagactaaggtttcctggggcaggctcgtccgcccagggtaagtcgggacctaaggtaaggccgagaggcgtagccgatggacaacaggttgagattcctgtactaatattaatcgttaagagcaatggagggacgcagtaggctaatggcgcatgtaactggaatcatgtgtaagcgtcaaggcttgaagtgagtcaaatgcttgcttctaaaaggctgaggcgtgatgcggagcgaaataaagtagcgaaggtcatgatgtcacactgccgagaaaagcttctagccagagagatattacccgtaccgcaaaccgacacaggtagtcgaggagagaatcctcaggtgagcgagagaactctcgttaaggaactcggcaaaatgaccccgtaacttcgggagaaggggtgctgatctccggatcagccgcagtgaataggtccaaacaactgtttatcaaaaacacaggtatctgcaaaatcgtaagatgacgtataggtgctgacacctgcccggtgctggaaggttaagaggagagcttagcgcaagcgaaggtttgaattgaagccccagtaaacggcggccgtaactataacggtcctaaggtagcgaaattccttgtcgggtaagttccgacctgcacgaaaggtgtaatgatttgggcactgtctcaacgagagactcggtgaaattataatacccgtgaagatgcgggttacccgcgacaggacggaaagaccccatggagctttactgtagcttgatattgagtatctgttaaacatgtacaggataggtaggagccagagaaagtaggacgctagtcttactggaggcgctgttgggatactacccttgtttgatggatgctctaacctaggccgctaagcgtggtcagggacagtgtcaggtgggcagtttgactggggcggtcgcctcctaaagtgtaacggaggcgcccaaaggttccctcagaatggttggaaatcattcgcagagtgtaaaggtataagggagcttgactgcgagacctacaagtcgagcagggacgaaagtcgggcttagtgatctggtggtaccgtatggaagggccatcactcaacggataaaagctaccctggggataacaggcttatctcccccaagagttcacatcgacggggaggtttggcacctcgatgtcggctcgtcgcatcctggggctgaagtcggtcccaagggttgggctgttcgcccattaaagcggcacgcgagctgggttcagaacgtcgtgagacagttcggtccctatccgtcgtgggcgtaggaaatttgagaggagctgtccttagtacgagaggaccgggatggacataccgctggtgtaccagttgttctgccaagggcatcgctgggtagctatgtatggacgggataagcgctgaaagcatctaagtgcgaagcccccctcgagatgagatttcctttgcgaaagcaataagacacctcagagactatgaggtagataggctgggagtagaagtagagtgatctatggagcggaccagtactaatcagtcgagaacttgaccaaagcgaaggttttttgttggttgaaattcagttttgagcgagtaagctcaaaagagagtgcggtggcgatagcaagaaggatacacctgtacccatgccgaacacagaagttaagcttcttcacgccgagagtagttggtgggaaactgcctgcgagggtaggtagccgccgcgctcttttttaataatccggtttagctcagttggtagagcgcttgactgttaatcaagatgtcgtcagttcgaatctggcaaccggagcaaacgaaggacagaccctatggcctgtcctttttttgtttgctattacgataaatttgggatataaaaaagcgtggtattaaccaacgctttttagtatacagcaccttcataaaaaccaaatcttggtttgttaaagttgaagttttttaattcgctaatcttaatggcattatcgcaaacgccccagctcattaaattaattggtttaccaaaatcttcatctggaataaccaataatacatactttccttggctcatggcgtatcctaattccatccctaagcctacatcttcttcttcaggaaggtatacacctaacattatatcgcttgttttaataccaattaagtcattagtataagttgcactagcccattctttgtcgtgtaagtactcaggatgttcatcgacgcgaatacctttgtattgattttgaagtggtacgtaactatgttccaaatcaatagttgggttttcttttaaggcagccatcgcagcatcatatgctttagtttgtttttcattaaaccaaccagcaccaaaataaactgttcttgttcgagtcatttttatttcctttctagattctataaattaactctatcatgaataaattttaaatctagtcttgatattaaaaaaataaaagtacacgttgattgtgtacttttattttttattctaagtaaatatttcttaagtcaataatgtcttgatttgaaagttgaattacattatgtagatactcattgattgaaccgtagtctttgttaattactgaaattgcatgatctaagtattcaggatgaacagtttgaatatctttaatagactgtaataagttatcgcttgaaccttttctcttttcttcaataagtaaattttcaacaaaagacttagtagtgatatttgttaataaataatctctctttataacttcaagtggaactcctagacttgataatagtaaaaaggctccaaagccagttcgatcttttcctgctgtgcagtgaaataaaactgattcattttcttgagtatttgacaaaagaaatttaaaaaagttttgatatgcatgacgagctgttgcggagtgaatcatgtcctcataggccaacaacatatgatcaaatccaaattgtggatctttttctgcttccgtctcaagggcatcaatactttttgatgaattagtcaaatcatcactaaagactggattaaaatcatattgaacgttttcaggaattcgatcaggctgtttctttgtttcttcttttgaacgaaagtcgatatcatatctgacgccataatttgtcaaatagtgacgatcagcttctgataagtcagctaaatgtccagatctcaatactttatgaaattttattttctttccggataaagtttcatatccacctaattctctaaaatttcggccgctagtaatattaattgatttgtttgataaattagtttccaaaaaatgcccttctttctaatctattggtattaaattttaccaacaaaattgttatgctacaagataataagtttgaataaaatatgttaaaatatatttaaaaataaaacgctttcttaggagatggaaattatggctaacgattataaaactattttagttccagttgatggttctgaagctgcggaaagagcctttgataaggctgtaaaaattgctattgaaaatggtggaaaaattgatgtactgaatgtcatcgatactagacaatttattggtgaaatgcaagatacactaattagcggtgatactatttatcaaatgactcaggattcagaaaactatttagtaagtctcaagaaatgggcaaaagataaatttaatttcgataaagtcgattatcatattcgttatggtagtccaaaaagaattatttcatatgattttatcaaagatcatcataatgatttaattattatgggggcaacaggtctgaatgcggttgaaagaatgttaatgggttcagttactgaatatgttaaccagcatgcaatggctgatattttaatcgtaagaactgaccttgaaaataataaaatcaataagaaaaaatagttaaatccgaacaatatagaagagcttctttatttataaagaggctctttattttaaattgatacctaccaatactacaggataaatattttagaaaaataatggtttttacttggaaatgtttcaagtttctgttatcatatcaaataacgaacattttggctttgggtaaggaggaaatatgatgttaacgctagcttttaataaaaaagtggaagtaagcaagagcctcgtattttctcgcgaggtttttgttcgtgtctatatttaagatattaacaggcttagtattaatagttttgctattaatattgagtcttttttaatgtctggggaaaatgtatttttattatcattagtaggaggataatatgaagaagttcaaaaaaatgttagttgctggacttgctcttgcattagcaacagtagcaactgcttgtggcagtaagtcatccagttcatcaaaagatggctatactcccaagagtttgacagttcaatttgttcctagtcaagctgcaaacaagcttgaagcacgtgctaagcctcttgaaaagatgctttctaaaaagttaggcattccagttaagatttctatgtcaactgactataacactgttgttgaagcaatgaagtcaaagaaagttgatgttggtttcttaccaccagatggttatgttttagctcataaacaaaaggcagctgatgttttacttcaggctgaacgttatggtattaagcaaccaggtggtgtacaaactaaggacttagttaaattttatcgtgctgaaatcttagtaaagaagggttcaaagattaagtcttggaaagaccttaaaggtaaaagtatttcagttcaaaacccaacttcatcagctggttacattttcccagttgcagaacttaaagaaaaaggtcttgatgtaactaagaaaggtaatgctaagttagttactgttacaggtcatgatcaagcagtattgaatgttctaaacggcgatactgatgcagcatttgtttttgaagatgcacgtaacactgttaagaaggataatccaaaaattatgagtcaagtagtaccaatctactttactaaggcaattcctaatgacactatttcagtacgttcagacatgaacaaagcctttaagaagaagcttgctaaagcatttattgctgttggtaagtctaaagaaggtaagaaattaattgaaagtatttatagccatgaaggttatgactacactagtgattctgccttcaatattgtacgtaagtacgataaaattgctggagaataagcataaatttatttataaggagttaatagtcgatggcagataagccaatgattcaattgaagaacgttaccaaagtatatgacaatggtactgtagggttaaataaaattaatcttgatataaaaaaaggtgattttgtagttattgtaggtttatcaggtgcaggtaaatcaactttaatgcgttctatcaaccgtcttcatgatattactgagggtgatattgtaattaatggtgaatctattactaatgcacgcggaaaggctttacgtcttattcgtcgtaatattggtatgattttccaaagctttaacttggtaaagcgttcaagtgttttaagaaatgttttaactggtagagtggcatattatccaacttggaagtctacttttaatttattcagtaaagaagataagcaaaaagcatatgaagcacttcaaagagttgatatggctgataaagtttattcaagagctgatgaattatcaggtggacagcaacaacgtgttgcaattgcacgtgtgttgattcaaaatccaaaaatcattttagctgatgaacctacagcttctcttgaccctaagacaagtagacgagttatgcatgaccttaagatgctaaatgaagaatttggtatgactgttgttgcaaatcttcactcaattgaacttgcacgtgaatttggtaagagaattattggtattcgtgctggtgaagtagtatatgatggtgcagtagaaaatactccacaagaagtattcgatgctatttacagcggaaaaaccaaggagaaaatcaatgcctaagcttgatcaagaaatgatgaaactacctaaaaagaagtttcaattttggaatctggtttggttagttgttttcatcggaggattagttgtttctacattagaaactaatactagtttatcctcattctttaataatttcggacaatttgctgaaatttttacacaaatggcacagccagattggggatatacttcaactgcgattccttacttgatagaaacaattaaaatggctgttttaggtacagttattggttcagctattgcgtttgtgtattcattgctaattgcaagaaacattattaaaaataagtatgttacaggtgtacttcgcttcgttatgaacatcataagaacattgcctgacttacttcttggtgcaatttttgttgctgttgtaggtattggaccagttgcaggtattttagccttatctgtatttacttttggtgtggttgttaaactattttatgaagcaatagaaactattgattcaggtccaagtgaagcggtaattgcctgcggtggtaataagcttaatatgatttcatttgctgttatgccacaaattttgccatactttatcagctacacactttatgcctttgaacttaacgttcgtgcttctacagttttaggttatattggtgctggtggtattggtctttaccttaagcaaacacttgatattttcgactatgcaaaaacaggcacaattattatcgcagtctttgttgtggtattaattatcgactatgtatcatctaaggcaagggaggcattgatgaaataatggatacaacatttaagcaattgcctgcaaagccagtttctgttaaagcgcgctttgctcattgggcacttacaattttcaccattgcactcattatttggtcaacaactggtatcaatttctcaggaattaaagctactgctggacaaattactggagcaattttcaatggccttatccatccagattggtcatatgtttataatggcacaggagaagacttagtttctcaattatgggaaactttgtgtattgcatttttaggtacttttatctccgcaattatttcaattccctttgcattttgggcagctactactaaaaacaaaaaatggtatacttctcgttcaggaaaatttgtattaacttttattagatgtttccctgaaatcgtattagctttgatgtttattaaggcggttggacctggttctgctgccggtgtattagcattaggttttcactcagtagggatgttagctatgttgttttcagaagcaattgaaagtttagaagatggacctaatgaagcagttattgcatcaggtggttctaagtggaatgtagcaatgttcgctacgctacctaacttaatgccagctttaatttctaatactttataccgatttgatgtttctgttcgttcagcttctatcttaggtatcgttggtgctggtggtattggttatcctttaactattgctttaaattaccgtcaatggaatcgagtaggtattatcctaattggaattatagtaatggttgttttaattgattggatttctggtgctattagaaagaaattagtataaaaactattaacttcaagcaaagagagggtagatcctctctttttttgttataatatgaaatgtatttttaggaggttctgcatggaaagtttaaatactataaaattagctgacgaactaactattaagcaagatgatatcttagctgatactgctaagttaaatgctgacgctatttatcagttaattgatgaattaaaagttttgaagcacccaattcaggaatactttgaaatgagtcaagatgagtattattctagtgaaagtgaccatcaacttacacttttggatatgaataataagcttgttgatctacatgatcgtattttaactaaccacgtagatggttatgttgataaagatgaaattaatttaacttataatcatgaaaatccatacgaagatggcatgtatgataaagaaactgattttcacgttttagcttatagcttgaaagttattagtgctgttatggctgtagcaccacaaaagttaactgaaattatttctaaagatgctgttctttcattaggacttgcagtgtatgctttaaagcataatgcataaatagtgacaaagatctgcatttgcaggtctttttcttttaggagggtttagtgtgcttgattttttcgcaaaaaagcttgctcaggtattaaataatcataaacaagaaaataataatgatactgatccaatgcaaggttttcttaaagtgggtgaatattcagttggcgctcaagaaaatactccagatggtggcaattatactttgactgtctataaagatgatcatggaattttacatcaagcactaagtccagaagagtctgataaactagctgcaacttatgttagacgatttgatagtcgacttggacgttttagagcatttcaaaatagaaaaacaggtatcagatataacgttacagactatttagataattttttagaacaaattaagccacaaataagaagtggaaacaattcaataaatattggtgttttaacagatactcattataaagatactgattcagttgatttttatggtaataatggcttgatacatgttagagagtttaatcatcttgaaaaatcagggcttctccatctaaaggctcatttaggggattggattgatggttcagatgctggactaattggagaaagtgaattaataaaattacgtaatagctttaagagtacacgaacaccttttgccattataaaaggtaatcacgatgaaaatgataaatttgatgaacatcatgacctgaaagctagtttccccgaaaatgaatttgaaaaaattatgtggcctatcatgtatgctcaaaaagaattgaaatatatttcaagatatcatggagtggcttattttgataaagatgatttaagagtgatatttgttaatacttcagatgttccctatatattagatgagcagggaaagaaaaaatatgatactaaattgacgcttgcgattagagaggatcaagttgaagaattaattgaaattttaagtaattctagtggcaagaagattattttacttagtcatggaaatccgattaatcgtaagggtggcaatgcacttaaatataatggccggtcgttgcatgaattattagttgcctttaatcagcgcgaaaaaggaagaatgcattcacataatgttccacctgaatttacattaagcaatgattttgattttactaatgtagaaaatgccagagtaattgcttatttctgtgggcatcgtcatgttgaagatcaatttaggattaatgggattcaatatattttatttaactgctcagctttaatgggtccagggcatgcactaactactaaatataataaaaattggaatcgtcaaattgatgatattactgaatttgctggttatgtagtgaatgttgatttagtaaaaagccaaatacaagtctttggctatggagcagccagttttaaacgagtctttagtatttaatttttctaaagatgtgctacaaattttagtttttagcatataataatatagttatcttgtaacaactttgtaaaatttataataaaaagaagaggacaggtaatatgtgcgggattgctgcgttttataacccagaaattaatgataaacaagctgccattggtaaaatgatggaagcaattaagcaccgtggccctagttccgatgggatgtatactaacgatgtaatggctttgggatttagaagattatcaattattgatcttcgtggtggaacccagccgatttttaatgaagataagtctaaggcaattatttttaatggtgaaatttataactataagccaattagagaagatttaataaaagcaggtcatacctttactactaaggcagatactgaagtattacttcatggatatgaagaatggggaatggctggcctacttaaaaaagtaagaggtatgtttgcttttatcatttgggatgatgaagaaaaggcgatgtatggtgctcgtgatttcttcggtattaagccaatgtactatcaaaataaggatggaaagcttttagtaggtagtgaattaaagagctttttggcataccctgattttaaaaaggaacttaatgtagaagctgttaagccatatttaatgaatcaatataatgatttaaaagaaaccttctttaaaggcgtatatcgtttcccagcaggtcattattttaagtttaaagatggtcaaatggacattaagcaatactgggatgcagaatataaagaaaataatttaagttttgaagaaactttagacaaaatcaacgaagatttgaaggaaactgttgaactatatcataatgcagatgttccagtaggtgctttcttatctgaaggtgtggattcaagttttgtaactagcttacttaacccagatgatgtattctcaattagttttgatgattctacgtatgatgaagcttcaaaagctaaagctttagctgatattaaaggctggcacttctttgcagataaagtagatgctgatgaagctatgagagatttccctgaaatgcaatatcatatggatgaaccagatgctaatccatctattattcctttatggtacctttccaaattggcacgtaaacacgttactgttgcactttctggtgaaggtgctgatgaattgtttgctggttatgtaaattatggtatgcatacccataacaatgtcattaaggtctttacttcaggacttaaaaagttacctaagggagtaaaatttagcttagctaaaggaattaaaaaaatgcctaacttcccaggtaaggtacatatgtacactaatttagctaaaccgagtgaattttacgttggtcaatctgtaatttatgatatggatcatccaacaattttctcaagtgatgatgctaacagtatgcttcaaccaacttatcgtaatgaactaacaacaaatggcctttatcaagaagactttaagaaagttaaggatttagataatgttaagcaaatgcaatatattgatttacatcactttatgttaaatgatattttgcaaaaagctgataagatttcaatggctcactcacttgaattaagagtaccatatcttgataaaaagattgcagaactagctaactctattcctactaaatatttagtaaataaacatgatactaagtatgctctaagaaaggcaagtgaacgagttctgcctgaagaatgggctaaaagacctaagttgggatttccaacacctattaaacagtggcttaaagaagagagattttacaagcaagttcgacaactattctgtgaagactttgttaatgagatttttgaacaagaaaagattattgacttgttagataaaaactttaagggtgatggttctcatcgccgtcaaatttgggcaatttatactttccttgtttggtacaaactttactttattgactacgaagaaacagttaagaaatatcaacatgtacaacctgaagttgctgcattaattgaacagggtaagttggtatagttgtcatatctatatctagtataaaaccacactaaacagtgtggttttttctatacaaaaaattttaaaatttattttgctagatgcaaaaagcatggtaatactggtttttgctaactacaatatatattagtgcctaaaaattgtaatacaatatattgtgttttcgtgctattatgtatctataatgattataatttatgagaggaaccggacatatgcttaaagaaacgcctagtaaaaagatgattgttgaggctatgaagaagccacaatatcttgtaaaaagagattcaaccaaaactaattttgaaacttataaattagatttagtaattcataatttaaagcttgaagatcatgaagttgaaattttaaaggcgatcttttctgatttagcaatgaaatatacggtttcagctgcagaagttgcagaaagctttgttgatagtttaactaaattaggttttgtagatgaagctaaagcatatattgaatatcgtaaaaaagacgatgctgactggaagaaacaaattgatactaaagcacgtttaaagagaatgattgaaggcgatccttcaattgttaacgaaaatgccaataaagatagtgaaatcttttcaactcaacgtgatttgactgctggtactgttggtaaaactgtaggtctaacaatgatgcccgaacatattgctaaagctcacttacgtggtgatattcactggcatgatttggattacactccactttcaccaatgactaactgctgtttaattgactttaaagaaatgcttactaatggatttaaggttggaaatgcctttatgactagccctaattcaattggtgttgctacaagccaagttgcacaaattattacccaagttgcctcaagtcaatatggtggctgttcattcgatagagctgatgaagttttagcaccatttgctcaaaagaattatgatcaccacttggaagaagccaaagaatttattgatgacgaagaaaaggctaaggcttttgctaaaaagcgtactcaaaaagatatttatgatgcaatgcaaagtcttgaatatgaaattaacaccatgttctcaagccaaggtcaaactccatttactactttaggttttggtttaggtacaaattggattgaaaaagaaattcaaaaagatatcttgaaaattcgtttagctggtttaggtaaagataagcggacagctattttccctaagttagtcttcactttaaagaagggcttaaacttaaatccaggtgatcctaattatgatgttaaggaaattgctttggaatgtgctacttatcgtatgtatccagacgttgtaagttacgacactattaagcgtctaactggatcatttaaagcacctatgggttgtcgttcattcttgcaaggttggaaagacaagaatggcaaagaagtaaattctggacgaatgaatttaggtgttattaccttaaacttaccaagaattgctatggaatctcgtggcgacaaggacttattctggaaaatttttgaggacaaggttcaattagttcatgatgcaatgaatattaaggctgcaagatgtcgtgaagctaaaccagaaaatgcacctgtattatatgaaaatggggcatttggtaagcgacttaagccagacgaagatgtaaatcaattatttgaaaatggtcgttgtactgtttcatttggttacattggcttgtacgaagttggtactgtcttctatgggcctaactgggaacacaataaagaagctcatgactttacagtagaaattgttaaacggatgcatgattggtgtgcatactgggaaaagactgaaaagtatcactatcactactctgtttactcaactccatcagaaagtttaacagatagattctgtgtacttgatactgaaaaattcggtaaggtaaaagatattactgataaagaatactacactaacagtttccactatgatgttcgtaagcacccaactccatttgaaaagcttgaatttgaaaaggattaccctccatacgcagctggtggctttattcattactgtgaatatcctaacttaaagcaaaaccctaaagccttggaagctgtatgggactttgggtacgataaagttggttatcttggtactaacaccccaattgaccgctgctttaagtgtggttttgctggcgaatttaaagcaactgctaaaggatttgaatgcccagtatgtggcaatcatgatcctgaaacttgtgactgtgtcaagcgtacttgtggctacttaggtaacccacttaagcgtccaatggttcacggtcgtcatgaagaaattgcccatagagctaagcacatgagtttaggtatggtaagagatcaagcacaagaagaggaaaaaattcaagatgccaagtaaagatcataatgcgcaagaaggccctgatattcgccataattatattaaagtaaacgttggtggggatactatttttgttgatagtaaccaatatttgcctaatattcaaaaggatcgtgcagcaagaaaattacgtaagcatcgacctaaggaccctaaacctaaggaatggctagctagtgagcattctttacaaaagattgctgattataaaccgtttaactttgttgatggtgagggggttcgctgtagtttatatgtttcaggttgtttatttgactgcccaggatgctacaacttagttgctcagaactttaattatggccgtccatatacccaagaattagaagaccgaatcatcagggatatgtctgaagattacgttcaaggtcttaccttgctcggcggagaaccatttttaaatacgcaggtttgtttaaaaattgttaaccgagttagaaaagaatttggccacacaaaagatatttggtcttggtctggatatacttgggatgaactgatgcaagaatcagaagataagttggaactattgtctaaaatagacattttagttgatggccgatttgaagaagatttaaaggatttaaccttacaatttagaggttcgtctaatcaaagaattattgatgtgccggcttctttcaaggcaggaaaagttgttatttggaaaaacttggttcactaggtgggagtatggaagaaaagcaattaaaattagtggacgaagtaattcaaaaacttcaaactgtaattgatccggagttatatgttgatattgtaaatttaggattaatttatggcatagatttaaatgataataatgattgtatagttacgatgactttaactgttatggggtgtcctttaagtggcgttttggataatgcaattaaagaagccgttttgtcgatacctgaaattaaatcttgtgaaattaaacttgtatggtctcctgcttggagtgtggaaagaatgtcagatgctgcaaaaactcagctaaatgtatggtctaaggacttatctagttatgatagttcgaataaaaagatagatttttctactccggtaaaaaaatatattgatagatacgatgattttttagatttgttattagaattaggatttgatcattttaaaatccctaatatgatagaaactgtaggtagagtaatgactttaaagcaggctgctcaagcaatgaaagttagtttgcctgttgttaaagagcgattagaatctgcgggttatcaagtagtgggatgaaaaagagtgttagtttgttactaacactcttttttgttgaattaacgcataaattaataacttactatcaattgtatcatgaaaaaaactaaaataaggcttttattcaaaaggtaagatgataaaatgatacacgatgaaatattaaagttttttgttttaggaggatttatgaaagtattaaagaaaatagctgcattagtaataatggctataactatgctaacagttgcagcatgttcaaataataaaaagaatacaacttcttcagttaatattcctaaaaatattaccaaaaaaactacgataactttctggaatgcgatggttggccctttgcaaactaatttgcaagagttaactaaggaatttgaaaagcaaaatcctaacatcaaagtcaagttagaataccaaggttcgtacgaagatataaagtctaaggtccaaaataccttacaatctcctaataatttacctactattgcccagtcttatgctggttatctatatactgctgcacaaggtggttatttacaagatatgacaccatacattaatgatactaatgtaggttggggaagtgtaagtaagtctaacattaataaaacattacttgaaggtgctcaaattaaaggtacacaatatggtattcccttcaataaatctgtagaagtactttattataacaaaactttgttagataaatatggtatttcagtacctaagacaatgtctgaattaaagactgctgctaagaagatttatgataaaactaatcataaagttgttggtgcaggttttgataatctgagtgcttattatactgatggaatgaaagaagaaggctacaactttaatagtaagattaactttacgggtactgcttctaagaatgttattaagtactatgcagatggaataaagcgtggatattttatgatagcaggttcacaaaagtatttatcagtcccatttgcaaacgaacaagttgctatgtatgttagtgctagtgctggtgaagcttatgtgaaaaagggcttaaatggtaaatttgaatatggagtcgctaatagaccatctaaatataatatggcacgtggtagcgatatctatatgtttaaacatgctagttcaatgcaaaaagctgcggcatttaaatatattaagtttttaacttctaaatcaagtcaacttaagtgggctaatgcaacaggatatattcctgtaaataatgaaactgtaaattcagctgcttataagaattctacttcaattaaatcaccagctattttagagcaggcaataaagagattatataacttccctgtaactaaaaattctgaaacaacctttaatgatgtttcatcaattttatcaggtattttatctcaaactaagactaaaaatgttgatagcttgattaaaacaggtaaagctaaatttgatagtgattggaaacaatagataattaaaaaagatagacaatgtctatctttttttgattagtcatctttttcttgctaaacttaggataataagtttggaggagaaattatgaaaacggcgcatggtgccactcaagtcaaagaagtaaatattcactcacttctattaggcgagctaattacttggttagggtcaagttttatctggcctttaacatcagtttatttaaataaggaattgcatgttagtttggcaatgattggagttgtcctattttttaattgtatggctaatatgtttggctcaatgattgctgggcgactctacgatcgaattaatccatatcccttagtagttgctggtttatttttagatgcggtagtattgttcttattggccttatttccaggttggcccgaatattggttgtggttgactttagcaggcttttttgctggttgggatggtgccttaatcaactctatggcaactagtattaagaaaatccctagtaaaaaggtatttaacttaatttattttgctcaaaatattggtgtagtaactggtacactagcggtaggatatttatatgacttttcagtaatttttttatttgtattggcagcaattttgtatttattagcaacgataaatgcggcaattaattatcggccaattattgcttatcataaagaattactcaaaaataaagtgaaaaaagaaaagaaaaaggtcaaattacctaaagcaaatttattgatgaattatggtttgttcattactttagggataacatggttgatgtatatgaactgggaatcaaacttgtcagtttatattgtttcttttaagattccatttcatatgtatagcttactttggactgtcaatgcgttaataattgtaataattcaagccgttttagctcgctttgaacatatttttaaaacaacttttcaacaggttgtgtttggaattttaatgttttcattatcatttgtaacattaatttttgctagagattttgggcattttttattatcaatggtaattttaacattcggagaggcgacagcttttcctgctattccctcatatgtcaatgatttaacacctatcgaagtaaagggagaatatcagggactcactattgttgcaagctcggctggccgggcaattggtccattaattggaggattgattattgaccaatttagttatattcctttctttatttttgcagcaattgtcatctttttgtgtttagccattcttgtacccatgcatactcatgtaaaatcaaaaattaagttattcaaataaattaaggtaccaatatcggtgccttttttaataaatttaataatagacaagttaattttaataatggtatcattagaataacatatcttaaggaggttaattatgaataaacaagctgtacgtggtggcgcaggagatattactagtcctaaatctggcgttcgccctcaagataacttatatttagctgttaactctgattggcttaagacaattgaaattccagctgaccgttcaagtatgggaagctttggtaaaatcgatgaaaatgtagaaaagcaattgatgcaagattttgctgattttgctgatggtaaaaaggcgattccaaatgttcctaacttagataaggctgttgcgctatataaagttgctcgcgattttgataagcgtaatagtgaaggtgccgaaccaattaaggcaagacttaagcaattacttgatttaaaagattttgctgatttaaaagaaaaggccttagaacttgataaagaaggtcttccagtgcctttattttttggtgttgaaccagacatgaagaatactaaggttaacattttgaataatgttggtccaagcactattttgccagatacagtaacttatcaaacagaagctaaagaccaattgcttccaatttatcaaaagcaaactattaacttgctagagatggctggcttgagttcagctgaagcagaaaaatatgttgaaaaggcgcttgcatacgatgctagaattgccaaggtagttaagtctagtgaagaatgggctgattatccagcaagctataacccaatgagtttagctgactttgcagctaagtttaagagctatgatattgttagtcatattgaaggcttagttggaatgaaaccggaccgagtaattgaagcagatccaggttacttagatcatgcagaagaattatttaatgaaagtgtttttgaagaaattaaaggctggatgttagctcgctttatcaataatgccgcagcaagtttatcagctgatttccgtcaagctgctttcccatttagtcaggctttatatggtcaagcagaactttcaagtggtgaaaagcaagcttatcgacttgctaatagtcaatttagtgaagtagttggtatttactatggtcaaacttactttggtaaagacgctaaggccgatgttatcgacatgattcataagatgattaaagtctatgaaaagcgtttatcagaaaattcttggctttcaaaggctactcgtgataaggctattgttaagttacaagctttggaacttaagattggctacccagaaaaaagtgaggaagtatataaccgattcaaggttgatgaaagtgctagcttatatgaaaacttagctgaaaatagtaagatttcacaagcatatgaatatgaacaacttcctaagccagttgatcggagcgtttgggcaatgcctggtaacttagtcaatgcatgctatgatccacaaagaaatgacttaactttcccagctgcaattttacaaaagccattctacgatttgaatcaaactagaagcgaaaactacggtggtattggagtagttatagctcatgaaatttctcacgcctttgataacaatggttctcagtttgacgagtttggtaacatggttaactggtggcaagatgaagactatgctgaatttaagaagcggattcaagctgaaattaaattgtttgatggaattcaatatggtccagttaagcttaatggaaaacaaattgtttcagaaaacattgccgatcaaggtggattaaccgctgctgttcatgcagcaaaaggcgaaggggatgcaagtatgcaagaactcttcgaaaactttgctcgtgtatgggcaattaagcaaaaagaagaagcaatcaagagtattactgctattgatgttcatgctccaggtccacttcgtgctaacgtccaaagtcaatgccaagaagaattttacaaggcttttgatgttaagcctggtgatggtatgtatctagaaccagaaaagcgggttgaaatctggtaaagtgtaaataaaaacgacttcatatcatatgaagtcgtttttattatgctcgggttccatccccctttagcttcttttttaagttagcatagttaattggttcaactcgcttaatgtatgaaggagttggttttcctaaaattaaagggactcgttcaactactgtatctgcatagtcaagtccgaaccaactagcgggattagaagatgagttttgtagaccaactcgagcttggataatccatttttcgtaagttgtcaattctgtttgtggacttactacgtcttgaacaataacgaagctaaagtcaccgacatctctacctggtgtagttgtatattcttgaggctgagattcaattgttccgtcagcaatcaagtcatgaattatttgtcgtaagtacacattaacactagtttgctttttgaaccctagataaagctggatattgataacattttttgttccataggtatttacagcatattctgcagtaaaaggttcattagttacattaaccgtaacaaaccagtatgcttgagctctctttggtcgtttatccaagatagaataaagaacttcacgtttgatgaatttattatacttaacttttgccatataaactaagttggtggcataagtcggataattttcatcgtgacttaagttggttagcatactagtatattcatctaaacgaacataagaattacgtgattctcttttatcacgtactttattaccaaagtaccaaatgtacataactattccaattaatccggcgatgattacagttacataaccaccgtgaacaaatttaactaagctggagattaagaacatcatttctattgcagcaaagaaagctaggaataggatgcgccagataaagtgtactcctttttttgctagatattcggataataaaatagttgtcattaacatagtggctgtaattgccaacccatatgctgattccatatgttcagaagtttggaagaagaaaactacagctaaagtagttgccccaagcatcttattaacagaaggaatataaatttgtccttgttctgtagttggataaacaatattcattcgtggcaaaaattttagttggctggcttcagaaacaagagtaaatgatcctgtaatcaaggcttgagaagcaataatagcagccattgtagctagaatgattgcatagactctgatattttcaggaacgatttgataaaaaggattaaagtctccactagttttaaagcccggattttgtaaaatccaaacaccttggccaaggtaatttaaaactaagcaaatgaatacatatggccaagagcctttgatatttgccttaccaacatgtccaacatctgaatataaggcttctgccccagtagtagctaggaaaatagaacctagtataaaaatacctactttatttactgggctaaacagtatttttacggcataaattggatttaaagcttgtaaaatcgaccaatcatttgccatattaattaagccgattacaccaaggaaggtaaaccaaattaacataattggaccaaatgccttaccaataaggctagttcccattcgttggatggcaaataataaaaggaggatgcaaacagtaattagaattaccattccttgggtagaaactaacacatttccaccaaagttcattcctttaagtccttcaatagccgtagtaactgtaactgcaggagttaatgccccatctgctagtaaagcagctccaccaactaaggctggaatgactaaccacttagctctctttctaactaaagcatagagagcaaagataccaccttccccatggttagtagcttttaatgcaatagcaacgtattttacggtagttaatagtgtaactgtccaaaaaattaaagagatagctcctaatattagttcgcgactaatattagtcattcctccatttccagctacaattgatttcataacataaaggggactggttccgatatctccataaacaataccgattgagattaataaaccagcagctgttagtcgatcacgcttttttaatttcatcatgaacctcttttatgtaagaaaaaactttaatcaaaaaaagaatgccaatcgacattctttttgactgtcccattttttcaaatcaaggaataaatatcgattatgataaacttccaggaatttgattacgttcagcttcataccacttatcccaatcttcaaaagtagcgaagctttctggatcaatgttacttttggcaacaacttcatcaagcaagctcttaaagttgtagtcgtgaacatttaatacatgctttactaattcttttcttgaaaagttgatgttattaagcaaataggtattgatatctaaaatattaccttttttatcgaatgaccccataatttcaaggtcattttgattgtacttagcaatgtagaagttggcgaagtttacaaggtaagcaggttgttccttaaattcagctttaggcatttcttcgcgattagcttctggtacaacaacttcaaattcgtcattatttttgtttaattcttcagtcaaggtaagaactcctttaaaaatgtccagattaattaactaaattaaaataaatcacttgtaattttacccagaaatcaacttaaaatcaactagtttgaaggctttaagtagttttctacgtcacttttagtaattgaatcaggggtcttatgaccttgggcaaatgcatatctgtataaattaatgatatcttgagggctccatggactagcattatatccaagagaatttaaacgattacgaatttctgattgagttgcactagaaacatttttgccatcaacagttcgattaccagaaaattcgccattcattttggaattagaatttgagcttgaagaactagaagactgcattgaacttgaagaagatgatgaggatgattgcttcttaagtaaagcttggtctttgtttaatttatcttcagtatttgatttaattgcttggtaatatctatcattaatatatggaagttctagaacttgttcataattattaatagctaattggaagttctgcttacgttctgcttcttgagcggcttcaagtaaaggctggatagtggttttgtaattgttataagcggtctttataactttctttaaagtttgagcctttgaaattaaaacatcataaccattttcttcattaataactttattaatggaatttaaagatgcagtgtatttggcacgtttaccataagttatagcatctgacatattttcagcttgattagcgtaagctttagctttagctgtatgctttaaatcgtaggctttattaaagtcactagctgcagcgtcgtatttttcatttttgacattttctttcccacttgccattgcttgagtgtagggggagctagcactaatacttgtattagtgctttggcttttatttgaataaaaaagaaagccacctgctgcaacgattattacagcaacaatggaaataaataagttaattttcttcattaaatgtaacctccaaaaattagagatataaactctcaatttatacccacattataacaaaagaaaactcagagtcccaaacagtagcaaaaatattatggagatatatttatttaatgactgaaattaacatttttgttaaaaaagtgtataaatattactgttttgttgcaaaactctagttcggttgaatggcgacgattgccaacgtacaatataattggattatattggagggaattataatatgaaaactaaaaaaatcactggcgttgctaccgcagctttactagcctccgttgctgtgccagttaccaacaatttagctaatattcagacttcctatactgctaaagcagtcactggtcaacagcaagcatttttaaatacagctatacctaatgctgaagcagcttctgctaggtatggaacgtatacttccgtcatgcttgcacaatcaatacttgaatctggttggggcgcttcacttctcgccacacaggctaataacctatttggtatgaaaggttcatataatggacaaacttattatactaatacttcagaatgggcctctggaacaggttattacaatataaatgctggttttagaaaatatccttcttgggcagcatcttttgaagataatggttacaaattaagaacaggtactaccgataatccaagtcgttatagaatggcttggattgaaaatgctgcaaactatcaagtggctacacagggcttgaaagatgggggttatgctacttcaccaacttatcctcaatcgttaaatagagtaatttcttcttacggtcttaatcaatacgatccgtctgtagataccacaactaaaacaatgagagttttatcaaatggaacagtttattccggtccagccgattctagtgtagttagtgcaactggtaatattactgctggtcaagtggttactgttgataaaacagttacttataaaaatggactaagttatatgcatattagcaatggttggattaatggttcattgttaaccggaagttcaactcaagctaccacaacagaaaaagcaggaacaacaaccgatgcaggtaatgcagcaattaaggtagtatacacgagtgcaattgcagaatggaaaaatccaggtagtggagtagtaggctacttacaaaagggaacgacccaaacagtagttggaaaaatccaagtaaatggagcatggtggtataagctatcatcaggtaattgggtaccaggggaatatgtatatgtcacaggtgcatcaagaataccaacaattgataacaatgtagtaaatcaaaatacaaaagtaaaaataaaatatatatcaggctatagcatagcagtatggtcaaatccagcaataggaacaacaggccaatatttaaaagacggaacagaagtacaaacgattggatatactacagctaatggcaagaaatggtataaattagcgaataatacgtggataccagcagaatatactgaagtagtaagttcatcaacagtggtaacgaatattactaatgaaagtaatacagtagcgataaattatccgcactacagtatagctgtatggagtgaaccaggtagaaactcaacaggaaagtacttatcagatgggacaaaagtccaaacagtaggttataccacagtagatggtaagaaatggtataagctagcagataatacgtggataccggcagagtatactaaagtagtaagttcatcaacagtagtaacgaatattactaatgaaagtaatacagtagcgataaattatccgcactacagcatagctgtatggggtgaaccaggtaaaaactcaacaggaaagtacttatcagatggaacaaaagtccaaacagtaggttataccacagtaaatggcaagaaatggtataagctagcagataatacgtggataccagcagaatatacgaaagcagtaagttcaacggatactactagcggaaataatacagtaacagtaaattatccaggctatagcatagtagtatggagtgaaccaggcagaaactcaacaggaaagtacatatcggatggaacaagtgtaaaatattacgcaaccgcaaattataatggtcaaacatggtataagataggtgaaaaccaatgggtaccaggtcaatatgtaaaagtaaatgcatcaaataatagtggaagcgtgacagtaaaatacatatccggatatggtatagcaatatggtcaaatccaggcagaaattcaacaggaaagtatctggagaatggcacaacagtaaaatattttgagacccaaaattacaatggccaaacatggtataaaataggtgaaaaccaatgggtaccagcacaatatgttagtgtaaattaatttttttaaaaagagttctctttgattagagagctctttttgttatccttttcttaagataaaaaagaggggagatattatgcttctagtaattttaatggccttagttattccaatttggatggctaagtttaatctacacaatattccgacagctgttgctgaaattattgtaggaattgttttaggtgttagtggatttaattgggttgatactagtaatagtcaattaagttttttatctaatttaggggttattattctgattttcttatcaggaatggagatagaatttgacctttttaagaaaaaacaagattcacaaataaatcctgtaaaaatagctttattatcttttttaggaatcgctgctttttcaatctttttaggctggatattatcaattttaggcctatttaaagatatgcttttagcaagcattatttttatgacagttgctttgggagtggttattgctactttgaaagaaaaagaaattttgagtaagagcataggccaaagtattttgttaacggcagtattaggggaagtagttccattattgggattaacaatttatgcttcaattcatggtggtgatgctgaaaaactatggttgattattctcttatttgtagctgctattgtattattaattagatttaagagaccatatctttggtttaataaaattaccaagcaaaccacacaaatagatatacgcttagcatttttcttaatttttgttttggtatcaattgctgaaaaagtaggtgcagaaaatattttaggtgcgtttttagctggtatggtaatgaagctattagagcctagtgaagccactaaggacaagctgacatctattggttatggattttttattccatttttctttataatgacaggtgctaaactcaatttgaagagcttatttactaatcaatcagcgttgttgctgttgccgattttagtgttagcattttttgtgtctaaagtgcctgctgtcttaacatacttaaaatattttactaagaggaacgcattagctggtggattattaaccgctacaacaattacaattgttttgccgacgttacaggtcgctcgaaaattgaatgcaattagtaaaactcaatcagatgcttttactttggcagctatcattacttgtattgcaggtcctattatttttaactcgttgttcaaattagcaccagaagataaaattaaagaaaaagttctgatatatggagctaatgttttttcagttgcagtagctcaagaactccatgataaatggtattcagttgaaatgattactgatgaccaagaagcctataatacttataaaagtcgtgtaaagtcattgaaatattgtaataatgttctagctattaacgagtttaattatgatattgtcgcaagttcaggctcagatgatgaaagaaattatgagtttgctaaaaaagctaaacaagctggtgtctcaagagttattgttagacaaaagcaacctgaggcaaatcgaattgccgaattaactcaattagatattgaagtatttaacggttatagtgctagaacttcggcaatgagggcattgatagaatcgccagctttttatgagattttgacagattcagacaatattctttacgatgttaagattcgcaatcatcgctatgcgggtcaccaattaatggatttatcttttattgataaaattacagttagccgtattaagcgtgatggtgaatggttagctcctcatggtactactgttttagaagtgggcgatgaaatagtttataccggaaaagttgaagatgctgacatgatcagagagttattgactaaagaaaattaaaaagagggacgtgctttacgcacatccctcttttttaggatataaatttatgaattttaattgagataattaaccaataacttcaactgtagcatataagattccagcagcaggaacttggctatttggcatagctacatctaattgattaggattagcagcggcaaagccaccagtatcattaactactcgataccaaacagtaccatctgaaagagtaatcttaagtttagtacccttagggaaaactgataagttagcagcaactccatcgtatcccatatttgaacctaaagcggcaggatcataaaagctaagtttgaaagtacctttgtttacaccagatacattttgattagctgtttgagttgtagcactagtagttgttggtgcttgagtaactgcttgttgagcttgcttttgttcttcttgagctttggcttctgcttctgccttagcttgagcatccatcttagcttgttcagctttagcattttttgttaattctgcaatagcagctttttgtctatctttaattaatttagcgcgcatttttacgggcttaatggtatcattaaccaaactggttgatacgttataatttgtttcttctgaagctgcttgtgttggatttacttcaataaagtttacaattaataatgaaatagccacaacgatagcagcaaaacgcttagttaataaaataaaaaatctactccctctaaaatttaaattgataactttttatttcttataggtaatattatataagtggaatatttcagaactttaatagtaaaattacaaatattagtgatttgaaataaaagttacatttttgttacaaatataaatataaatgtaaaaaagaggtgctatatgaaaaaaagtaatatttttcctattatttatgcaattatttctgctatattaacttttattgctgtattttttattttattcaatacatttcatataaatttgagttttacaatttttggggcagcattaatagcggttatttcttatgtctattcatattttagagctcatgcttccgcagaaattaagcgaattgtatatcagtatggtcttaatgatgcagaattagctaagatgacggggctaaaaaaatcagattttccaatttatcaggataaattacaattaattttacctaaaagaatgtggcctcgtgttttgcatgttttacaagaatatgaacaaaagcaacagagtaaagaataagtaaaaatatacctagtggtatataatggatttttaactaacaaaaagggagaagaaagtgagtttattaacagttaaaggtttaagtcagagctttattgataagactttatatgaagatgcaaactttgtattaaacaaagaagatcatatgggagttactggtcaaaatggtgttggtaaatctactttgataaaaatcttaacgggtgaaattgtgcctgatgatggacaagttaaatggcaaaaaaacataaaggtaggatatcttgatcaatatgccaaattaactccaggtatgactctaaaagcttttttaaaaacagcattcgcagatttatttgctcaagaagaaaaattaaatagcttatatgttgaatatagtgaaaaaggtgaccaagcattactggataaggcaggaaagattcaaactcacttagaagaagtgggcttttatgatattgatactgccattgatcaagtagcaagtggactaggactgcttgaattaggctatggtaaagatgtcagtgaaatgtctggtggtcaaagatcaaagctgattttagctaaattacttttagagaagccacaagtactagtactagatgaaccgactaattatcttgatgttaaccacatagattggctagttacttatttaaatgattttgaaggagcttttattgttgttagccacgactatgattttttaggacgaattactaattgtattattgatattgattttggaactattactcgttatacaggtgatttgaagcacgcaatgcgtcaaaaagctcaagatagagaaacttatttaaaagcatatcaaaatcaacagcgaaagatagctaaaactgaagcttatatccgtaaaaataaagccggtactcgtgctaaaagtgcacgttcaaggcaaaagcaacttgatcggatggaaaaattaaccccaccacaaaataataagcgggcaaaatttgactttccatatgtagctacggcttctaatttattattacaaactcaagatttagttattggatatgatagagcattagtgaagcatgcctttaattttagtgtgggtggaaacgagaaagtagctgttactggttttaatggtattgggaagactactttattgaagaccttactaggaaaattaaagccagtttatggtaattttgaattatctgctacagcaaaattagcatactttaagcaggatttagcttggcctaataaaaatatgaccccattacaatatctagctgagtgttatgaaaagataaaacctaaagaattacgtcaagctttggcaagaatgggattaacagcacaacaagctatgagtcctctaggagaattatcaggtggtgaacaagaaaaagtaaaattagctaagatgcaatttgagccagctaatattctttttcttgatgaaccaaccaatcacttagataatgaaactaaggatgcattaagaaaagcaattgtaaattttccaggagctgttatcattgttagtcacgaacgtaatttctttagaggaaattgggttgataagacgattgatattgaaaaaatgaactaattgaggtcattatgtttgaagataaagaacgcttaaaagaaatacaacggatttgtttattagcgggacatctgatgattgaaggcggcagtgaaatgagcagagttgaggatacaatgcttagaatagctcgtaatgccggagtatcagatccacaagtttttgctactccaactggagtctttttaactttagattcaggtcagttatcacaaatagaacaagtgcgtgagcgaaacattaatttagaactagttgatcgggtaaataatttatctcgtcaatttgctaataaagaaattaatttgcaagaattagatgagaagttacatgatgtagcaactaatacagcagcttttcctctatggcttcaattgattggtgctgctagcttatcttcaactttaatgattttattttttgatagctatgactggcttgatttcccagctgctgcaatagtgggttgcttgggattcttagtttattattttattcaaaaatatactagaatcagattcttatctgagctaatagcagctatgtttatggcattattaacttacttaattcgtttgctagttccagagtgttcaattgataaagtattagttggtgctttaatgacactggttcctggcttagctctgactaatgcgctgcgtgatttattcgcaggagatttaatgagtggaattggacgctttgttgaagcggtgatgacggcacttgctttaggtggtggagtaggtattattatgcgatttttaggtgcttaagatgacaatatggctacagattttaattaatattgtgttttcaataattggttcaataggttttgcattgacaattaatgttccaagacgagcgctttttctgactgggattagtggggcttgcggttggatgacctattgggtgctaattaggctacattcaggaagaatgattgctaacttagttggtgcctttgtaattggaatgttgggcctatattttgcaagaataaaaaaatgccctgtatctgtttttaatattccagcgttagtccctcttgtacctggagcaccagcttacatggctgtacgcgcattggtacaaggcaaatatgatttggccgaagacttaatgctgagagtaggaatcattacagttgccattgctttgggatttttattatcaactttgcaaagtgagtttatttatcgtttaaaaatgcattataagaataaataataaaggtgacttgtatcttgtgatataagtcattttattatttgtaactaattaagcaatgataaaattagcttaaaggagcttgatacttaggagagtgaagactatgccaataattgatgtaaaaaacatttcaaaagaatataaaaatggaaatacaacaatttttgctaataaagcaattacattttcaattgaaaagggacaattagttgtcattctaggtccttcaggcgcaggtaaatctactttgcttaatattttgggtggaatggatacttcaacaagcggtgacgtgatagtcaatggaaataatattgctaattattctagaaaagaattaacagcttatcgtagagaagatgttggctttgtcttccaattttataacttagttcctaatctaactgctaaagaaaatgttgaattagcagctgaaatagttcctaatgctatggaagcgagtgaagcattaaatgcagtggggttagggaatagaatgaataacttccctgcgcaactatctggtggtgagcagcaacgtgttgctattgcccgggcaatagctaagaatccagctattttattgtgtgatgagccaactggtgcgcttgactatcaaacaggtaagcatgttttgaaaattttacaagaaatgagcatcaagaagggttcaacagttgttattgttacgcataatgcaacaatcgcaccgattgccaatcaagtaattcatgttcatgatggtcaagttaagaagattgaaaagaataaacatccaacagctatttccgaaattgaatggtaagagctaggagaatttgaatgagaaaaaggattctatggaaggatgcttggcaggcaataactgactcattaggtaggttcattgcaattttgatgttgatgatagtggctgtatttacttttatttggcttaaaatgacgggcccagatatgagaagtagtgctattaacttatttaaaaataataatttagctgatattacagttctttcaaatcatggtttaaatcaaaaggacaagcagaaaattgaaaaacaatcagatataaaattagttgaatacagctatcttatggattctactgttaacaatagtagaagaagcttgagaatatattctgaaagtaagaagatttcaaaagccatgcttactaaagggaatctacctaaagctaacaatgaaatagttatttcttatttattgcaagataagtataaacttggccaaaagttaactttagacaatcatagtagtttaaagcataaaaagtttacagttgttggttatgtccgttcaagtgaatatttagataaattggatacgggacaaacaaatgtaggtacaggccaactatctggatttgcttttataaagaagtcggcttttaaatctggtacaacaactggaatagctagaattacttataaaaagactgctaagatgaatccatattcaactaagtattctaactatattaatgataaggaaaaagatttaaagaaggaattagataagaatatttcagctaaagaaaataaaactaaaaataaaattgctgaaattaatgatagtttaactaagttaaatgtaattgtagcggttaaacctgaatatcaaagtcagattaagcaacttgaaagtgctaaagcgaagcttgaacatttgaataaacctagctacacagttaatactcgtgatgaattcccaggttatgaaaattatcgttcaaatgcagaaagaattgacgttttatctaatatcttcccagtattcttatttgcaatttctgccttagtttctttaactacaatgactagatttgtggaagaagaaagaattaatattggtactatgaaggcgattggatatagtaattttgatgtagctaagaagtttatcgtttatagtatgctttcaagtacactaggagttattttaggagcttggggtggatttagagttttacctggcattatctttgaagcttatgcagccaattcaactatgactggctttagaagtcaattctctttagtttggctaatattaggactagttgttgcatgggcatgtacgactttagcagcactttacgccttaaagaaagatcttaaagaccgcccagctcaattattactacctaaaccacctaaaaaaggctcaaaaattttccttgaaagaatcacaccattttggagtagattaagctttaaccataaggttaccttcagaaacctctttagatataagacaagaatgttaatgacaatctttggggttgctggttgtacaggattattagtaatggcttttggtattcgagattcactttcaggaattagtaagaatcaatataccaacattatcaaatatgacatgattgcggttaaaaactcaaatcctagttctaaacaaaacactgacttattggatgaactagattcaaatagtgttaaacgctataaacagattcactttactactttgaatcgtaatcttggggaagacaagactaagcaaactattaatgtgattgttcctaaagcgaatactgacttatctaagtatattaatttaatgagcagttctactggaaagaaattaaaattaaccaataacggtgtaattatttctgaaaagttggctcaattaaccaatgctaaggttggacattatattaagttaaaagatactaacgataagtggaaaaaattcaaagttagtggcatttgtgaaatgtatatgggtcactacatggtaatgaataaacaagcttataagcattactttgataaagaatataagactaatggttatttgataactactaagtcaggtaaattacaaacagtttctgaaaaactgatggctactggcgcaattaaaggtattaatcaaaatgttaacaataagaaaacaattgataacttgattaattcacttaataaagttattttgattttgattgcgatttctacaattttggcattggttgttatctataatttaactaatattaatgttgacgaaagaatgcgtgaactttcaactattaaagtattgggattctttgataaagaagttacgatgtacatttatagggaaacaattattctttcaattctaggtatcttagctggatatttagtcggtatttggttacatagctttattattaccaccttaccacccgttaatgctatgtttgatcctaatatgtacatatctaactttatttactcagccctcattccagcagtactgactactgtcttagcatttattatgcacaagaagattaaagacgttgatatgctagatgctttaaagtcagttgaatagatgatataatcattagcgacgagtcgataaagaacgcgagatgcgtatatttatcaggggacatctgcttttaatagcaaggcacgggaagtgttgatgttttggaagacctattgtgaacgtggaattccaactttgcccaaaaagaaaaaactgttagttcattaagagctaacagtttttttatataaatttttagcatttaaaggctaaactttcatatggttctagtgttaattctgaatttaaatgtgtaagctttctattgtagttgctaattatggtattaccatctttatttagccattctgttggtaaattgagtttaacttttctatcagaaaaattattcaagacaaggattttctcttttgtatcatctaagaagcgctcataggcaagaacatgtgaattatcttttaataggccatgaatatggccttcatagactaatcgctcatttttacgaagtttgattaattcttgataataattaaaaatttgcccatcattcagttcttttctgacgttaatttcttcctgatctgttggcattaaccatggttttatcttagaaaaaccggcgtattctgaattatcccaatgcattggcccacgagaattgtcgcgtgctttactgtgtacgatttcaaatgcttttggttcaggatatttctttagtaattctcgataggcattttttgcttcgacatcaacatattgatcaattgaatgataagctggatctttcatacctaattcttctcccatgtagatataaggagttcctcgcatgagatgaatcgttgtcgccagcatctgtgcagattgaatccggtattttccagtattgccaaaacgattgagtgcccaaggttggtcgtgattattccaaaaaagtgcttgccagccatctgctttatctagttcctcttgccaagttaaaagtaaatcttttaactttttaaaatcaaaatgggtgatactccatttttcaccatttaggtaatcgacctttaaatgatggaaactaaagaccatagatagctcatgattgtctggtttagtatagccgattgaattcttcaaggtggtagatgacatttctccgactgttatgcaatctgggtcttgaccaaaagtgttctgattaagttctttaatgtaagtatgaacaactggcgtatcagtataaagacttttttcttgagctggatcttttgaatcaactaacaccctatcttttccaattacattcaagacatcaaatctaaaaccagttacccctttttgacgccagaaattaacaatatcaaaacattcctggcgcacatttggattgtgccaatcaagatcagcttggcttggatcgtataggtgaagataatatttaccagtatcaccgaatttttcccaggcaggaccaccaaattttgaccgccaattattagggaaaccaccatttttgccatcacggatgtaaaaataatcttgataatacttgtcgccagctaaagcctttttgaaccattcatgttcagttgagcaatggttaaataccatatccatcatgataccgatattgtgcttttttaattcggcaactaatttttcaaaatcagccatggttccaaaatgcgggtcaatttcacggtaattagcaatatcatagccgttatctttttgcggagaaacgtagaatggattaaaccaaatcatatcaatatttaattttgcaagataatcgattttttcgataatgccaggaatgtcgccaactccatcgttgttggaatcaaaaaatgattttgggtaaatttgataaattactttttttccgagttttgtcataatttttctcctaaatcttttgtctacgtgcaaaatcagtaaattcaaacttatcaggtctatgataagaaatggttagctgaagtaaactggtgtcgtctagatagaccatacttctgacgattacgacattactattttgagctaagttcagagtcttggcgatgctttcatcagctttttcaacagtaataaccttagtagcataagaaatcttcaatgaaagtttattttctaagtagtcatagatagaatcttgagctacttgattgctgatagaaggaaccaactttttgattaagtagtcaacatcaactacagctggctcaccatcaatttttcttaatcgcttcaaaaagatagcatcttcaggagcaattctttttcccatgaaagtcgaagggaaagacttttcactgttttctaaaagaatcgtttctgcattcattcctaaactgcgatttaattctttaaatgaagttagcccggaaatcgggaagctatatctacctaaatctaaaactaaagaaccttttcctctaattttttgaattaaaccaagctcttgcatcatctttaaaactttacgaatagtttctcttgaagtgccgtataaatctgtcaattgattttcgcttggtaaaaaggagccaggttcgtaaattttatacttaattttttttgctaaatcacttgcaataatttcatatttactagtactcataaactcacacccttatcatcttttcttttattttatagcatgtatatacaagtatcaacaaatataatctttaattttagcctagtaaaaaagataaacatttttattgacaacttgtatatacaagattaatattgaagtaagaaaaacatgtaagggctttcggaggtcgaaaatgagtaaaaaaataaatattctggctccagctaaaggccaagtgctggcattaaataaagtgaatgatgaagtcttttcttccggaattatgggagaaggttttggattagaaccacttgaaggtacaatttatgctccagttagtggaataattaccatggtagccgattcaaagcatgcgattggaattaagactgaagatgaacttgaagtgttagttcatatgggaattgatacagttggtcttaatggagaaggatttgaggtttttgttaagcaaggagataaagtagcagctggtcaaaagattgctactatgtctttagaaacaattaaattgcataatcttgccacgacagtgatggttattgtgactaattcgactgctaagcttgagggacttgacttagaagaagtagaaactaatgaaaaagcttccgttgctgcagcttatgtaaaaagtgctgtcgtaaaagatggaaaactggattacgacgctttagctgatgtaattattgaaaatgttggtggagaagacaacattaagtccttaattcactgtattaccagattgcgttttggtttgaaagatgaacaaaaagctaatgacgaagttctgcaagatacagacggagtgattgatgttattcatgcttctggtcaatatcaggtggttattggtaacgaagttacagcggtttatgatgctgtgatgaagaagctgcctaacttatcagataatgacgaagctgaagaagaaacttcagaaagtaaaggcattagtggagctttcaaccagcttattggcatcataactggttcaatgagtcctgttgttggtgttattgcagcaagcggtattatcaaaggaattttagcactgttgactttgccacaacttggaaatctacttaatgttaaaagtgaaatgtatatcacaatcagcgctatggctgatgcggcgtttttcttcttaccaattttagttggcttttctgctgctaagagattaggtggcaatccaatcactgtggctgtgattggtggattcttaacttatccgcaaatgattgcttggggtaaggcgtttaaagatattttcgtaattggaaatgtgcacttccaattcttaaattacacttactcgattttcccaatgattttggcagcttggtttgctaagaagttagaggattatcttaagaagattttgccaagctttttgcagatgattttcattccgatgtttacgattcttgtagtatcaagcattactttacttataactggtccagtaattcagggattagctaatggaattgctgatttgattaatgtcgtagttcactcatcaggttggattggtggattaattattggtggattttatcaattactagtaatttttggcttacattggggagtcgttccacttgttgcgcaacaaattgccggctctggcgaaagtgcattgaatgctatcatctcagtaactatggtatctcaaggtgcagctgttttagcagctgctattaagactagaaagaatgacttaaagtctttaggtattgcagcggcaatttctgctttttgtggtgtgactgaacctgcaatttatgggattaacttacgttatagaaaagtctttgtttcaggattgattggttctgctgttggtggttttattactggattgatgcatggtagtatgtatggttttactggatcattaattggattttcgtcattctttaatccaaaacatgcaacagatttaactagcttttatgcatttctattctcaagtattgctgcaattttagttagctttattcttacatgggtttggggttataatgattccatggctcaaggcaaaaaagtagagaaaagaaaacttaataagtaattgaattaaattaaagtgaccacttctttccatgagaagtggtctttttatacctttttaacctatgcaaacaagtttatccgttgtaaaatagttggtgaaacattgaattattaaaggagatatttcatgtcaaaattagttttaatccgtcacggtcaaagtgaatggaacctttcaaaccaattcactggttgggtagatgtaaacctttcagataaaggtgttgaagaagctaaaaaagctggtcgtttaattaaggaacacggcttgaagtttgatcaagcttacacttcagtattgaagcgtgctatcaagactttgcactttgcacttgaagaaagtgaccaactttggattcctgaaactaagacttggagacttaacgaacgtcactacggtgctcttcaaggcttaaacaagaaggctactgctgaaaagtatggcgatgaacaagttcacatttggcgtcgttcatacgatgttttgccaccagcaattgatgatgacaacgaatacagtcaagcacatgatcgtcgttattcaaacttagaccctaacatcgttccaaaggcagaaaacttacacgtatgtttagatcgtgtaatgccattctgggaagatcacattgctcctgacttattagcaggtaagaatgttatcatcgcagctcacggtaactcacttcgtgctttaactaagtacattgaacgtatttctgatgaagacattatggacgttgaaatgaagactggtgaaccagttgtttacactttcgatgacaagttgaacgtaactgacaaggttaagttagacgactaatttttccattaaaaagactatcctgttaaggatagtctttttatttttttacaatttggttatgaaagttccttttgagtgatattttaaaaatttttcgataaaattaaaaaataacaatataaaggaaaaagtatatgcagaataattatccaggtaattctcgagtagcgctttatgaaagtaataaacgaaaaagaaataaaaaaattcgcttaattattggaattattatgattttattacttgggataggttcctattttagttatatcttctttagaacaaagggtgcaattgataagacttatgatcctaagactgctgttgctacgaatagttcaacttttaatggaaaaaagagttttgctgtcttattgatggggacagatactggagctttcaacagaactgataaaatgggaaatactgatacgatgattgtagcggtagtaaacccaactaagaagcgttatacgctcatgtctattccacgagatacaatggcacagatggttggtgccaaatcattaactgctgaaaaaattaatgctgcttattcaattggtggagcaaagatggcgatgaacactgtttctaagttaataaatgttccaattaaatactatgctgtaataaatatgggtggcctacgtaaaatggttaatggtgttggtggcgtcacagttacaccacctctgagtttttcatatggtggctacagttttaaaaaaggtaaaaagactaaattaaatggggcacaagctttagcttatgcaagaatgcgttatgatgatccaactggtgattatggacgccaattgcggcaaagacaggttattatgtcattggttgaaaatgcttcttcaatttcaactttggctaacttagaatcaattttaaattcagtttctgaaaatataaaaactaatttaacatttaataatttaatggctattttccagaattataagagcagtactgcaacttcaaagagtgattatttacatggcttaagtgttaccattgatggagcttcttatcaagtgatgtcagatagtgaacttcaacgagtatcagactatattcgcagtgaactaggacttgaaaaagaaaaaattagtaattttgaaacttatgaaaataaattaaatgaacaaaatggttttagttttaatagtactgaaactcaagaatataccgtatatgattacggaagttacactagttcagatacaaatagtgataatgatcaagatgatgatacaggagattattaaccttgatacattttagttcatttataattggatatattttaggcaattttttgtttgctctaattgttggaaagtatttcctccatgcggatcctacacaaaatgggtcaggtaatcctggtacagctaatatgggggccgtttttgggaaaaaatggggtattttaaccttaataggggatgctgtaaaaagtatacttgctttaactattacttggcttctatttaaaagtcaactagctatgacatattgtggcttgggcttaatgttaggtcattgttatccaattactaatcgttttaaaggcggtaaaggggtagcagttgtaggaattacaatattggctgttaactttaaaatagctttgattattttgttaattgcactagtattaaccattgtcatgaaaaatttgactattccccctttatttttcacttattgttttggagtagttaatttgttattaggtaaagttgatcgaggtttgatttttcttttaataggaattattatgactattcgcttttggaaagatattattgattttgttcagggcaatggtaagaaggttgatattttattcagtatcaagaaaaagcttggaataaagatataaaaaggtaagttagatatatttctaacagactattattaatatttaggagaattaaataatagtgtcatttaaaaattaggtattttcttgatgtctgaattgactaaaacttgtttaacttatatgatattgataacacaaaaagatagtagtctcttaattcagtgttcagagaactagcattgtggtgagagctaggcaggttaaggtgtgacgaagtacagtgtacggggcgaaattcctcgttagcaactataaaggcgcgcatagcgcaaacgtgggtggtaccacggctatctaatgattattagtcgtcccttgatttaatcaaggggcgttttttatttgatggaggaaattatggcaaagtttgatatcttagaagatcttaaatggcgtggcgccattaaccaacaaactgatgaagaaggtttaaagaagtacttagctgaacatgatgatttggcactttactgcggtactgaccccacaggagactcacttcatattggacacttgattccatttatgattttgaagagattccaacttgctggttatcatccagtaattattatcggtggaggtactggttcaattggtgacccatcaggtagaaagactgaacgtgtccttcaaagcgatgaacaagtgcatcataatgaagttgctttaactaaccaaatgaaaaagctatttggtactgagaacttccaaatcgttaataaccgtgactggcttggtaagatgagcttacttgaatttttacgtgattacggtaaattgttccaaattaataacatgcttgctaaggatgtagttgctagccgtcttgaaaatggtattagctttactgaatttacttaccaaattttacaaggtatcgacttctacatcttaaaccgtgactatggtgtacaaatgcaaattggtggtagtgatcaatggggtaacattacctcaggtatcgacttaattcaccgtttagaaggtaatgaccgtccagcctttggtttgactattccattgatgcttaaggctgatggtactaagtttggtaagtctgctggtggagctgtttggcttgatcctgaaaagactagtccttacgaattttaccaattctggataaatcaagatgaccgtgatgttgttaaatacctcaagtactttactttcttaagtcatgaagaaattgaagcgttagctgaaaaagttaagactgaaccttggaaacgtgaagctcaaaagactttagctgctgaagttactaagtttgttcatggtgaagcaggacttaaggaagctcaaatgattactgatgctttattctcaggcaatgtgaaggatttgtcagttaagcaaattgaacaagcacttaagaatgcaccaagtgcagaaagtaccaatgaaaagcagaacttggtagaatttttagtagatactaagattgaatcttcaaagcgtcaagcacgtgaagatattcaaaatggggcaatttatgtcaatggtgacaagattcaagacctagaatttgaagttgatccaagtgcatcatttgaaggtaaatatgtaattatccgtaagggtaagagaaagtacactttagttactattaagtaataaaaaatacctagccattggctaggtattatgccgttttagctcaggaggtagagcaccgccgtggtaaggaggaggtcgccagttcaaatctggcaaacggcttattgttttttcttgataaaaatactttctattagtaaaagtagtgcacccaatatagtcaaaaatatccctagttttaatccaggtatttcaaaatataaattaattgtatgtttaccagatggtaggttaagggctatgaaggaattgagagttttactaatcggtgtagattttccatcaactattgcgtgccaaccattagtataaggaatagtagtaactaaagattgtcccttgtgaattgtaacagtacccgaaatcgaatttcctttccaattagtgaggttcattttattattttgagcttttttaatagtttgccacaattcttttttattaagtagataaagcgatggccgaattattgttaaattatgagtagaagctttaaatgtcatagttaaagtgacttttccagaagctggtacaaaaattccaataggttgtgtgctaaatggcatggatctaaagctttttccgttaatggttaatttacttgctctagaatctccatcttcggcggtcatgatttgtttgtctaaaattatgtatgcacttgtattaggtgttgcaatatagttaaaagttaatgttgcagacttagaagtatctatttgcttaaaacttatattttgttgattacttgaaattttagcattttgatagcttattcttccttgaattgctttactaaagtaattgttattagagtttgttagtttatttaatattttactttgattttctaatggattattagaaataggaataaagttattataactgtaccctgcaaatgctaatggaaaagtttctgatttataagctatattatgtgaatctttataccaaatagggttctggcttaagtcctctcttaatccatagttacgaaatttaggaattgtatcgttaggccgatttgtttgaatatttgtttttataccaaatagagcatcagtcaattgagttccagttaaataaaaatagaagtatcctagtccttgtaatcccaaatcatcataaagattgctaattttaatatcattatttgaagaaaagacagttgctcctcgataattaaatgtatagctttcgcccctattttgattaattaaaaagttcttttctaatcgactatttttagcagtagctggtaatttattaattagattttgagtttcaacagtatagttttcataactagatgggataacagaatgccaactaaaaattgcgtttaaacttatttctaaaattgtaataattagtaaccatatactattgattttcttcttagtgtaaaaccaataagtgacagtagcaattaatatccaacatactgaagaaataatccaagctaaatttatagaatttttatgtcttatataagctgaaataataaataatattcctaagataatagtggtgagttcaacttgtctttttgttaactgttgttttgccaactgatagcatgcaaccaaaataaataaaaaattaagtataaatgcaaatctaaaaggataagattgaggtggctgaccagcatgccataaaacataaagtttattagataataatcctgaacaagtaaataaaagcaaggctaaagtagcaagtttttctcttatttgtatatgaatattgaaaaaatatgcaattgttaatagcaaaactaaactaccagtataaataagaggaagttgagtgttgcttgctccaaaaagcatatttgatggaagattaaaaagcaatttaggaatactgtaattagtaatagcatagtgagtacttaattttgtttctttcaaattaagtagtgtaggtagttcaataaaaagagtcaataatactccacttattgaataaagtacaaagtaagctaaattctttaaaaatcttttccaggttttaaactttaaaaaggaaatataaatgaaataagctattagaaacaatccaatcatgtagctagtgtagtaattagccaatatagtaatagctaaaatgatagaatagataggtttctgtctaccaactgcaaatttatgggttaataatattagcaaaggaagaaatataatagcatctagccacattaaatttcccatgtaaaaaattgtatagctcgaaagtgcatagctaattgaaactgtgatagccaaagtagatgttagcttagttaatttttgaatagcatagcaaaaactaccagctgctagcatcactttaatccaaataattgtatataaagctatggttattttagaagcggggaataataaaacaataaagttcagaggacttaatagatagtaagcccaattacctatcatgcttccacctaatccattggaaaagctataagcaaaatctgaatgattacctaaaatcacatgtctaaaatattgaaaaaaagatgtgtattgggtcattaagtcaccagaagtgataactccccctgcgtagacattttcatgtctgaaaaaggttattgtcaaaaaaataattgctgtaattataccagctaataaccaaggatatttttttagtttcatattcactctccaaaataaataatatatcacctgattaattttactctatattctcttttatttacataagcgatatagataagtgattatgcagcattatataaaaagcaaaatttgtgaatatattacctattgatttatttcgatttattcatttgaaggtaaatatgtaattatccgtaagggtaagagaaaataaactttagttactattaagtaataaaaaatacctagcatttggctaggtattatgccgttttagctcaggaggtagagcaccgccgtggtaaggaggaggtcgccagttcaaatctggcaaacggcttattgttactcttttttatttcataatgataaaattatcttaaataaaagtgaaagaagagatgagatgcataaacttacaatggcagaaattgccaaatttcaaaaagattatcatgaaaaggcccaaaataatgttgctaaattagctgttgtaaataatggtttgctcaacgctagttataaccatgaaggtgcaaataagcttaatcgtactttttcaattgaagttccaactgataatgtaaccaatcaaaaacaatctggacgctgttggttgttcgctgctttgaacactttgcgccataaatttgctcaaactaataaggcgaagaactttaccttgtcacaaagttatttgtttttctgggatcgaattgagcgtgccaatatcttttttgaaaatattattgaaactgcaactcagccacttgatgatcgagtagttcaatcttatatggcagcaccggatactgatggcggtcaatgggcaatggcggtttcacttattagaaaatatggtttagtacctagttatgctcaagcagaaagctttacagctaataacacttcagcttttaatcaagctttgaatatgaaattacgtcaagatgccttaattttacggaacttggtaaaaaataataaattagatgaggctgaagaaaaacgtcaagaattcttgagtgcagtttatcaaatggcagttattgcttttggtgaaccagtgcaaaagtttgacttagagtttcgtgatgatgaaggtaagtatcatatggatgctaacctaagcccattggatttcttccataactattttgaagatgacttagatgattatgtagttttatttaatgcccctgatcatgaattcgataagctatacagcttgccatttgaagataatgttgtaggtggcagtcctgttaagttcttaaatactaaaattgataacttaaaagcagcagctattgctcaacttaaagctggagagactatttggtttggttgcgatgttggcaaagcaagtgatcgtcaaaatggtattttgagtagagatttatacttaactgacttagttttgggtattaaaactaatctttctaaaaaagaacggttattaactagggcttctggttcaactcacgctatgactttagttggtgtggatttagttaatgacaacccaagacaatggaaggttgaaaactcttggggtgaaaaagcaggtaaaaatggctactttgtcatggatgatgcttggtttgatgaatacttatttaaggtagtcgttaaaaaacaatatcttccagaaaaattagttaagatttgggaaggtccagcaactgccgttaaaccttgggattcaatggcataagttaaatttgatatattaaactagttctaaatgaactagtttttttagttaatacagattttcagatattgttacttaagacttttaaaatatttatagctttttataattaaaaatgtaagcggtttaaggaggccgataaatatgaaaaagaaagctattatgattggagcaggtcttgctaatatggcagccgcagtctatttaattcaagaaggtaaatggtctggaagtaatatcactttttatgcattagataaacatgggtcaaatgatggtagtgcagcaaatgaagctagtgaagaatattggaatcaaaatcatccaatggaaaacactaaagggtttattgcccggggcggtagaatgcttaactaccgtacttatgttgatttaatggatttgttgtcaagaattccttctgtgacagaatcaggtatgagtgcagaagaagatacacgggactttgatagtaagcacagaacttatgataaagctcgcttacttgaaggtggcatcggtattgttgatggccataaactgggtctgaataacatggatagaatcctcttaagtcgtctagttatgatgccagataatcaagaagaaaaacttgataatgtcacaattgcagaatactttaaggatgatcctcatatgttccaaacgaacttctggtacatgtgggaaactacttttgcctttagagttcaatcatctgcgcaagaattacgccgttatatgcatcagatgatttacgaatttactcaaattgagcacttagttggtgttaaccggacacgttataaccaatatgaaagtattatgcttccattaattaagtatttgcaaaaacaaggttgtaaatttgtaatgaatcggagagttacagactttgaatttaaagacactccaatgcaagatgaaattacagtaacagcacttaagatggaaaataccgagattggtaaggaggaaaaagttgaggttgataatcaaactgcggtcttctttacgaacggatcaattactgattcagcaactttaggtgattttaacactccagcacctgaaaatatggattatggtgcagcatcttcattatggaagaaggcttgtgagcacttctacaatttaggtagtccagataagttctttaatgatcgtaatgattcagaatgggtaagttttactttaaccactaaagatcatactttgttaaatgaaattactagaattaccacacaagttccaggaaatgctcttaactcattcatttcaactagtccaattacgcctctaggacaaaaagatgtaaatatgtcaattgtagttcaccatcaacctcacttcactacgcaaaagcataatgaaacggtcatttggggttacttcttatatccaagacgcaagggtgaatttattgacaagcaatatatcaagatgactggtaaggaaatgttacaagagttgataggacaactttctaaggttgatccaggaccacacaatattaaggatctagaagataaaatcttagctagcgtaattaactgtatcccatgttatatgccatatgcttcagccttgtttaacaaccgtgctaagagtgatcgtccagaaatcattcctaaacattcaactaacttggcctttacgggtgaatttgttgaacaaccttaccaaatgatctttactgaagaaagtgctgttcgttctggtgaagtggcagcttttcactttgcaggtgtgccaatgagtaaattggtttcaactccaagatatgataaagatccaaagaccttgatgaaggcaactaagagaatgtttagttaaagaaaaaatggttcagaaaattctgaaccatttttattatgctaatgaatcccaagcaggaagctgttgagcaggaccttcagctaatttttgttgttcgctagtcaaatactttttgtggacaactacttcataaacatattcttcaaaccaatcttgactcataacgtagtagcccttctttgcaactttttcgccccatgaattttcaactttccattgacgaacatcaccgttatcttcatcaacaccaactaaagtcatagcgtgagaaacttcacccataccagtttcaagccgttctttcttagtcatagtcaggtcaacgccaaacaagtcatctaacttgtataagtcagttgctaaaaagccagtcttgttttctttttgcttaccaacatcattaccaaaccaaactgcttcaccatcttttaattgggcaattgcagcactagttagaaattccattggaacgttcaaaagcttaatagggtacttgccttgaacattgtcttcagatggtaatgcaaaaagcttattgtattcatgatcaggtgcgttggttaaaacaacataatcactcaaatcaacatctttgaagtacttgttataaaattcgacaggagttaagttcttttctaagtgatacttcttatcatcatcacgatattctaagtcaaatttcttaggtggttcaccaacagcgattgcagtcatgcggtaaacttcgcttaaaaactttttgcgagccttttgtgcagcttctaagtcaccagcttgcaccaattttctaagaactaaagcatctttcttttctttttgtgccaacgcttcagctaatgcggcagtgttgttagtgttggcagtttcaggcatagcataagtaggaacaacgccatatttttcaactaatgaaattgccatgtgccattgaccaccatcatgaccagcgaagtcaaagtaagctttaacttcacggtcatccaatggcttgtccgcattttctaaaacataattatagaaattattagcacgttctactttatcccagaaaaagttataagcttgtgaaaaagtgaaattcttagccttgtattctttgccaaaatgatgacgtaagacgtttaaagtggcaaataaccagcaacgaccagattgaagttgattagttacattatcagtatctaattcagttgaaaatacgtgagttaaacgatgtgatacagcatcgttatatgatgcttctaatacaccgcttcttttggcagctcgagctacaacttggctagtaggatcagcattaaattcacgactaaaatcttctaattcttgtaaagttaattcattagccataattaaatctcctttaattctattataataattactaatataactcaaaaactttcttaattgctagtcttatgcttaaaaaaattaattttatatgtcaaattgtcttataatagaagttagaaaaaggggtagtatttatgtataaaaaaataattacttcagtagctttaatattggttttggcaggagcggtagcagggtgttcacaaaagaaatcgacgacttcttctactaagcaaagtcaaattgtagaaaaacatcataaaaaggcgaagaaatctaaaaagcgtaagtcaacacgtatagatgaaactgagaatcaaaatagttcaaccgaaactagcagtcaaagtaatgcaaatgaaactgcttcttcgaatgctaatgggcaaaatactggtagtctaaataattcaaacaattcaaattcaacgaatactcaaggtgcaacgaataacagtcaaacaaatactggtagagctaataactcaaacagtactgaatcaattgctaatgctgcggtaaatgattggcttaaacgtggaggttacccagctagttttactgataaagatttagtagcatatatttcttcttcatcaagtgaaacccagatttctgtagctgaaaaagctagtggccatattgtggctaattatgtagcaaaagcaaatggactatactactatgatattgttaacaatacactgattaaggtaaattaatggtttattttcaaaaaatgacgcctcaaggttataaattgattgaggaagaaatcaagaatttaaagaaaagtcgcccaataaaaattaaagcacttcaagaagcgagaagtttgggagatttatctgaaaatagtgaatacacagaagctaaaaaagagttacgtcatctggaaagtagacttcgctatttagataagcaattaaaatatgctgaaattataaccccgaatgacgataaaaaagttgatttaggtaagaaagttaaactgcgttttgaagatgatgagacaagtgatacctatgaaattgtgggaagattggaagcggatttagaagcgggtaaaatttcatttgattctccattaggtgttgctatcatgaaaaaagaagcaggtagttgcgtcactgttgaagctcctgctggttcatatgaagttacaattgaagaggttttgtgagatcaagtttttaacttgatctttttttataaaaagattgcattttttatggaacctgtgtagattataattacgaacttatgtttgcaaaaggaagaagagcgaatgtatgattataggtatgaacctcatagattaatatttatgattgataataagtcattttatgctagttgcgagtgtttgagattaggcttaaatccgatgacgacagctttagcagttctttctcatcaaccagatagtgatgaacaatccagcttaatcatggccgcatctcctttagctaagaaaaaatatggcttaacaaatgttatgagagcgagagatctaccgccaaaatctcaaagagaagatttgcttttagtggaaccacatatgaatttgtatatcgaaaaaagtatggaagtattagatatttttcgaaaatatgcagctgaagaagatatacatacttattctattgatgaaagtatgattgatatgactgaatcatggcatttgtttggcacagatccatatttagttggcagaaaaattcaaaaagaaattaaggaaaaactaggattatatactacatgtggtataggagaaaacccattacttgctaaacttgctatggatattgatgcaaaaaagagatggtcaatgattgcgttttggcattatattgatgtccctgatacaatttggcaaataaaaaacttagaagatgtttggggtattaataaatcaacagctcagcgattaaaaaaattagggattaatgatatgaatgaattagctcattgtaatcctgaaaagttaaaatctgaatttggaataattggtgagcaactttttgcaataagttggggtgttgatcggagtattatcaggtataaatataagcctaagcgaaaaagttttggaaattcgcaaatcttaatgagggactatttgggccaacgagaaattgagattgtaattagagaaatagcagaacaagtggcagctagaattagaaaacataaattgcttactagttgtatttctttacatataggattttcaaaactgaaaaataacaagagaaatggtattaatgcaagcaaaaaaatcacagcgacaaatgataacattgctttaactacggaattaagaagtttatttcgaaaatattggaatggcgaagcagtcagaactattagtattagttattcggatttattgccagatatagagcaacagcttgatttgttttcagatccagctaagcaaataaagcgtaaaaattttgattatgttattgattctctcagagaaaagtatggtccaactagtttagttaaagcatctagtcttttgccgggagcaactgcaattagacgagcaaatttggttggtggacataatggtgggaagatttatgactagtgataagcagatatatgatttctttaaaaactatcaagatcgaggaatgaagaaatggactggctttttcttgagtgctcatactgccaaaatatctcaaagtaaaaaatgtgaaaataatagattgaaaaaagctttagatttagaaaagataaagaaagtattgttagaagcaaccactcagggaaaaatagttcagatacaattaaaagcagtggacctagatggagccccttttcctgaaattaaaggaattattgaaggctggattgataatcaagtagttattaatcgacagataattaatatatcagaaataaattgtcttgagattgttaaagaactgtaattagatattagagccatgtagaccaatttttgttataatttaacaagatatggtttaggataggagtgtggcacttgaattcgccaaaatctgtacaaggaaatctaattagatatgcggtctttattgtagggtacttaatggttataggagccaaagagttatgtgctaatagctcaaagttgcatatttgggatttaattctatttgctgttgtaactgttatgacctttttattatatgtatatcgttttaagagagaacaaagatattttgaaaaagtaaataaagtaagtttattagataatatcaaagtgactctttggttatcgtttttaattttctttttacgtggattagtatcttatttacaagtaaatcaatatataaactcctatacctttcaattaacttatgctaaacatgaatcagtatcaatgttttggttcttaatttttgcacaaggcttagtattaccttttttacaagtgtttttagctgaaggatttttatttaattatttatttagagataatgtggggtcagtagcaatttttggtatagtattttcaggcctgatatttagcttagttaactttcagttgaacgtacctgtatttttgtttgatatggttttcggcttgatctttgcttgggcatatttatatagtcaaaatattgttatgccactttacttagcgattttgaatggcttgttgatggtaatgctagtataaaaataaaaaggaattccaattggaattccttttttgttgagcggatagcgtgaatcgaacccgcatccccagcttgggaagctggtgttttaccattaaactatacccgcaagtacatgataagtttatcatgaatatttcctttgtccaagagaaaattgcgagatatgttaaaataaaggtaataattttgaagtttagaaaatttgaatttaaggagataactatggctaaagaagtacttttgacgggagatcgtcctactggacgtttacatattggacactatattgggtcattaaaaaatcgggtaattttacaaaatgaaggtaaatacgacccatatatcatgattgctgatactcaagctttaacggataatgcacgtaatcctgaaaagattcgtaacagcttaattgaagttgcacttgattatttagcggtaggaattgatcctgaaaaatcaacaatttttgtccaatcacaaattccagctttatttgaattaacagcttactacttagacttagttacagtcgcaagactcgaaagaaatccaactgttaagactgaaattaagcaaaagaactttaatgaaagtattccagctggctttttgacttatccagtatcacaagcagcagatattactgctttcaaggcaactttaattcctgttggggatgaccaagaaccaatgatggaacaaacaagagaaattgttagaacctttaaccgcttgtacaatacagatattttgaaagaacctaagggttacttcccaccaaagggacaaggtagattaccaggacttgatggtaatgccaagatgagtaaatcattaggcaatgcaatttatttagctgatgatgctaagactttaaccaaaaaagtaatgtcaatgtatactgaccctaaccatatccacgtagaagatccaggccaagttgaaggaaatacggtctttacttaccttgatgtttttgctaaagatcaagataaagttgtggacttaaaggcgcaataccaaaaaggtggtttaggtgatgtgaagatcaagcgttacttaaacgaagttttggaagaagaacttgcaccaattagagaacgtagagaaaagtttgcccaagataaagatgctgtttatgaaatgcttttagaaggatcaaaaaaagctaacgaagttgctaatgaaactttgcaagaggttcgtgatgcaattggatttaactacttcaaaggacaaagataatggctaatcatcgtattccttgggaacaatattttatgatgcaagcgctagttattagtcaacgctcgacttgtaatcgcgctctagttggtagtgtgttagttaaagataaaagaattattggcacaggatataacggctctgtaacgggtcaagcacattgtgatgatgttgggcatcaaatggtcgatggacattgcgttcgcacgattcactcagagatgaatactctgattcaatgtgccaaaaatggcgtttcaactttaaatactgaaatatatgtaactcattttccttgttataattgtacaaaagccttgattcaagctggtatcaaaagagtaaattacttttttgattaccgtgataacccattagcagtagatttgttaaagaaaactggtgttgaagttaatcaaattaagttagattctagttatgtccagaatctagttgaggaaattggtcaaaatgaagtctaaatgtttgattttctttttattgttattttttccaatagtaacagcttttagttccaatgatttaacaactgagcaattaattcaaagacaaaatcagttttatgagcaaaaaaatattgaagttaaaattaaagttgttaatactaggcctgcaaaagtagcgccaaaagagatttatcttttggttaaatgtagtaataaaagaaataatatacaattgtacgttggtaaaagctggcaaaagattattacttcaaataaaaaatcagccttattaaccagtcaagcagaattattaaagtccactaataaaaatcagtttagccaaggagtcaagcgattattgcgtgcagtttttaccttaattgaccaaagtcaaggtattacgagtaaatatgacttagctcaatttgaattagacaaaatgttaaagccaagaagtttatccttaccagtaacaattatgtttggattaatatttatgtctggtacatacctttaccgaaaatttatatttaagagataattcttgacgccttcgaaattatgagtttatactcaatttgtaaatttaatacagcaaataaactgttaggtgagactcctacgtgaacacacgctatcgcccaggaacatccagagatgccaacgggttaaacaggtattgtcgagttaaggcactatccagatagctagcatgtgcttacgtcacgtagtgttaaaactgaacgattggttataacgcagccttttaaagagccttccttttggtgggctctttttgtttgtttgctcaaaaaagaggaggggttttcgatgattaaaatcaaaaagaaaactagcagtaatgcaactaatcgcaagtttttgcaagaagttgcgatggaagaattaaccaccacttttgagcgatatgatagttctggtaaagggctaagtacatcccaagctgaacaaatgcgtgaaaaatatggtagaaatgaaattgctaaaaatgagcataatactaaagcccattttttatttgaggcctttatgacgccatttacggtagtgttactcattttggctactttatctttatttattaactatatccttgttccagctagtgataaggacttaagtacagtaattattatgattactatggtattgatatcgggattaactagttttattcaaaatgtaaaaactaatgatgctgttcaatctttgcttaaaatggtttctgttacgactaatattcgccgagatggtaaagaccaagaactagcaacaagtgaagttgtaccaggagatattgttaatttagcagctggggatatggttccagccgatatgaaattaatcaagagtaaggacttgttttgttcttctagttcactaaatggtgaatccaatcctgttgaaaagattgcagggcaaaagcctgataagaatcagttaaatgaatatattgattatccaaatgtagtttatgaaggaacaacaattgtttctggttcaggaacagggattgtatttgcgacgggaagtcaaactgtttttggaaagttagctcggcaaatttctcagactaaaattaaacaaactagttttgatacagggattaaagatatttctaaactattaattacaatgactgctgttattgcaccgttagtttttttgattaatggtttaactaaagggaattggttagatgccttaatttttgctatagcaaccgcagtaggtttaacgccagaaatgttaccggttattgttactagtaacttagttaagggatcagtagaaatgtctaagcatggcacaattgtcaaaaagatgaattcaattcaaaattttggatcagctgatattttgtgtactgataagactggaactttaacgcaagataaggttgttttagaacggcactatgacttaaatatggttgaaaaaccaaaagttttagaattgtcttatttgaacagcttttatcaaacggggatgaaagatttaattgataaggctgttattgatgcagctgaaaatgaacttgatactaagaaaattaagcaagattatgaaaaaatcgatgaaattccttttgatttcaagcggcggcggatgagtgttgttgtccaaaataaggctggcgaacatttacttgtaactaaaggtgccgctgaggaaatgcttgaggcaagtgatttcgttgaatttaatggtcaaagacttccactaactaaagaacaagaagaaaaagttttatctaatattaatgatatgaataatgatggtcttcgtgtcattttgcttggatataagaaaaatccagcaccagttggtgagttttccgtaaaagatgagtcagaattaacaattgtgggctttttagcttttcttgatccaccaaaagaaactgctaaagaggctttgcaccatcttaaagaagacggtattactgttaaaattttaacaggagacaatgcagccgtaactagagcggtaggaaagcaagtcggattagatgtttctaaaatatattctggtaatgatttagaaggaaaaacagatgctgaattaagtaagatgattgaagaaagtgatatttttgtaaaattatcaccagaactaaaaactagaattattgaaattttgaaaaaagatggccatacagttggttatatgggagatggaattaatgatgctccagctatgaaagcagcagatgtttctatttctgttgatactgcagttgatattgccaaagaaagtgccgatatcatcttactttataaagatttgagaattttggaaaatggagtaagaattggacgaaaaatttttggaaatacgatgaaatatatcaagataactctttcatctaattttggaaatattttatcaattttagttgcttcaagcttcttaccatttttgccaatgttacccttgcagctattaattttggatttactatatggtactagttgtttggcaattccttttgatagtatggatgcagaatatctttcacaaccaagaacttggtcaactaagaaattacctaagtttatgttttattttggccccacatcatcagtcttcgatattatcactttcgccttactttactttgtgatttgtcctagcgttgcaggtggcggttttacaagtttaagtttggcaggaaaggctattttcatagcagtattccacacaggctggttcattgaatcgctttggactcaagaaatggtaattcatgctttaagagatagaaaattaccattaattaagcaacatgctacagccccagtaatgcttgcaacttttggtgcagcggtaataggtagttacttaccatattcacgtgttgctacaagtttgaaattcggctcaatgccagggacttttattgaaatagtagttggtttattaatactttatattttattaacaagtttagttaagagactttatctcagaaaagaaaaatttttgatttaaatttgatacaatagaagggattctcatagggaaatcccttttttcatggtgtatgattaaattagtaaaaatgtgaaggagacaaattatggctgacaaaaagactttttatattacaactccaatttattatccatcaggccgattaactatcggtaatgcttatacaacaattgcagctgatagtatggctcgttataagcgtagccaaggttatgacactttctttttaactggaactgatgaacacggcttaaagattgaacaaaaggctgaaaaagctggtattaagccacaagaatatgttgataacatggctaagcaatataaagaactttggaaaaagcttgatatttcttatgataagttcattcgtacgacagatgctgaccacgttaagagtgtacaaaagatttttgaaaaacttttaaagcaaggcgacatctacttaggcgaatatactggttggtacagtgttgaagatgaagaatattttactgaatcacaattaaaagaagtatttaaagatgataacggtaaagttatcggtggtattgctccatctggtcacaaggtgcaactagttaaagagccatcatacttcttcagaatgagtaagtatgctgatcgtttacttaagtactacaaggaaaatccagacttcatcttgccacattcacgtgaaaaggaaatggttaataactttattaagcctggtcttgaagacttatctgtaactagaactactattgactggggtattccagtaccaagtgatccaaagcacgtggtttatgtttggattgatgccttatcaaactatattactgctttaggttatggctcagatgatgacagcttatttaagaagttctggccagctgatgttcatttagttggtaaagaaattgttcgtttccacacaatttactggccaattatgttgatggcccttgatttaccacttcctaagcaaatttttggtcacggttgggtcttaatttacaaggataagatgagtaagtctaaggggaatgctgtttatccagaatcaattgttgatcgatttggtctagatgcattacgttactacttaatgagagctattccatttggtagtgatggtagtttttcacctgaagactttgttgaaagagttaactttgacttagctaatgacttgggtaaccttcttaacagaactgtttctatgattaaccaataccaagcaggacttgtaactaagccagctagtcaagatgacttaggtagtgatttagctaaagcagctaatgaaacagtagttgaataccaaaagcaaatggatgcactccacttctcacaggctttagatgcaatttggaaattcgttggtcgtgctaacaagtatatcgatgaaactactccttgggttttaaacaaggaaggtaagactgaagaattagctcgagtaatggctaacttagctgaaagcttacgtttaattgcaattatgattagccctattatgactgaaagtccagctaagatttttacccaattaggtttgaactttgaagatgaaacacaaaaagccttagaatttggggcatttgcttggaacattaaggttactgaaaagccaactccaattttcccaagaagaaaaaaggatgaagaggtagcatacattaaagaagaaatggctaaagctgtaagcaagaagcaaactagaagtgaaaagaaggcagcagaaatggaagaagaaaagaactacatttctattgacgattttgacaaagttcaaattaaagttggtcaagttgttagtgttgaagctgttgaaggttcaagtaagttgcttaaatttcaaatggattttggcgatgaaaaacgtcaaatcttatcagggatgcacaaattctaccctaactttgaagagttagttggtaagaagattttagctgtaactaatttaaagccacgtaaaatgatgggaattgaaagccaaggtatgcttttatctagtgaaaagggtaagaaagttaagcttgcaattgttggcgatgaacatgatttaggggcattattaggttaatggagatttttgacgcacatacacatttgaatgacactccttttagagggaaagaagaagtatatctgcaaagagctgcagatttacatgtaactaagatggcttgtgttggacaggacttagaatacaacaaacgtgctcttgatttagctaaaaaatttgataacgtttatgccattgttggttattgcccagatgttgccaaagattattgccaggaatgggaagacttgcttgttgagcaattaaaagagcctaaggtagttgctctaggcgaaataggccttgactactactgggatgaatctccacgtgatttacaaaaagaaatctttagacggcaaattgaaattgctcatgatttaaaattaccggttaatatccatactagggatgcttttaaggattgctatgagattttaaaaactagtaatttagaatacggcgcagttttacatagctataatggtggacctaagtggacgaagaagtttttgacattagataatgtgactttttcattttcaggggttgcttcatttaccaaagctgtggacgttcatgctagtgtgaaactagtgccacttgatcgattagtaatagaaactgatgcgccttacttgactcctaagccatatcgcggaaagcaaaatgaaccagcctatgtttattatgttgctaaagcaattagtgagttaaaaggtgttagcttagaagaagtagctgaagctacttacaagaatacggtgactgcttatggaattaaataataaaaactttgatgccgttgtagtagttgaaggtaaagatgataccgcacgtttgaagcagttttttccaggaattgagacgattgaaacaaatggttcagcagtcagtactgaaactttggcgttaatcaaaaaagttgcccaaaaacgggacatcattgtgtttaccgatcctgactttaacggagaacggattcggaagattgtgactcaagctgtgccaacagctaagcaagcttttgtaactagaaaagaagcagaacccgaatttagtggcagtttaggtgttgaacatgccgctaaagaagcacttgagcgagctttagttgatttacatgaaatgaaaaaaataagtgatttaacttttgatcaatatcgtggtttgggcttagctactagttctcgttcacgcaaattgcgcgaagctgttggagttaaattaggtattggctatgcaaatggcaagcaattttataagcgtctggtgatgtttggtattggcttttctgaattaaggcaaacggtaagtgaggttgaaaatggcaaataatttaccaatttgtgacccaattagaaccaaagcgataatgaatcgttatttgggtttcgctaagaaaaatttgggacagaactttttaattagtttaaataaaattaatgacattttagatgctgcagaaatagatggtgatgatcaagtcttagaaattggcccgggaattggttcattaacagaacaaatgcttttacgtggagctaaagttttagcttacgaaattgaccaagatttgccagaaattttgcataatgaattgcctcaaaaaataggtgacaagtatttagatgatgtatttaaattggtaatgaaagacattctaaaagctgattttaaggcagatattggcaacttctttgatttaaataagccagttaaagttgtagctaatttaccatattacattacaactccaattatttttgctttagctaagagtgatttggcttttgaaagcttaactttgatgatgcaaaaagaagtagctgaacggctatgtgcaagtagtgggaataaagagtatggtcctttaacaatctttgttcagacgcaaatgagtgtaaaaatggcagtaatggtagatcatacaaactttaatcctcagccaaaagttgattcagcagttgttgttcttaaaccacttgtacaaaaaattgatgttggggatactgataattttgatcatgtggtaaaaatgtgtttttcacaaagaagaaagactttgaataataatttaaagtccttagttaaagatagtgaagaacgtaaaaaacttctacaaatgttggatttaccagaaaaagtacgcccagaagagttatcaattgatcaatttattggcttagctaaggcattgaaggctgaatgatttttaagcttgttgaaaaaatcacaaatttgtgataaaattatttcacaaaggagtgttttctagtgccaacatcaatcatatcaattaagaagttattagattctcatgtgggtgagaatctaactgttgtagcccaagcgggtagaaaaaaggtaactaaaagaaaaggtatcttgaaaagcacctttcctgctgtatttgtagttgaccttgatcaagatcagaatagttttgagagagtttcttacagttatacagatttgttaactaaaaatattgaattaaaatttgaatagtatataataaaacattgttttttacgaacaatcactggtgttttttatagaacactagtgattttttgttgtcattaatgtatattataagttgattatttacaaacattaggaaggaataaccatgaaacgttcagaaagactagttgatatgaccaaatatcttttggcccgtccgcatacgcttatttcattacctttttttgctaagcgttatggttctgccaaatcatctatttcagaagacttatcaattcttaaacatactttagctgctaatgaagatggtgtattagaaactgtggctggtgctgctggaggagtacgctatattccttttttaggtaaaaaacattcagaagcatatttacaagaattggcggatagaattgaagataccgaacgaattttaccaggcggctttgtatatttgtctgatgtgttaggatcacctagcgatatgcaaagaattggtgaaatggtcgctacacactatgcttataaaaacattaccgctgttatgactatcgaaactaagggtatccctttagctgaagcagtatctagatttttaaatgttccatttgtaactgctcgtaaaagaggaaaagttactgaaggtgcaactgtttctgtaaattatttatcatcatcatcttctcgagtagcaaaaatggaattaccaactaaggttttaccaaaaggctcaaatgttttaattattgatgattttatgaaaggtggaggcaccttaactggtatggagggcttagttcgtgagttcgattctacagttggtgggatttgtgtgctttgcgaaactactcatgcagataaaatggttgatgattatctatctttagtaaaaattgatgagatagatactgaaaagatggttattaaaacctctcttggtaatttcttagagaaaactgattttaatcgcttctaaaatggtatactagagcctataagtatgcgaaagggattaagtttatgaagaaatttgtagttgttttagctgctggtaaaggtaccagaatgaagtcaaagctttataaggttttgcacaaagtttgtggtaagacaatggttgaacatgttgttaaagccgctagcggcatgaaacctgaaaagattgtaactattgtaggtactggagctgaagacgtaaaaaaagttttagctggtaaaagtgattttgccttccaagaaaaacaattaggtacaggtcatgcggtactaactgctgcaccagttttgaaaaatgaagacggtgctactttggtagttactggtgatactccattgtttacaacagaaacatttgaaaacttgttcaattatcaccaagaaaaagaaaatgctgcaacagtcttaacagctgaagcacctaatccatttggatatggtcgaattattcgtgatgaacaaggcaatgttttacggattgtcgaacaaaaagatggaaagcctgaagaacttaaagttaaagaaattaacacaggtgtattctgctttgataataaaaaactttttgctgcattaaagaaagttactaatgataatgcccaaggcgaatattatttaacagatgttttggaaatcttgcgtaatagtggtgagagagttggtgcatataagatgcctgactttagccaaagtttaggtgttaatgatcgagttgccttggcaaatgcatctaaaattatgcaaaagagaattaatgaagagcatatgcgtaatggtgtaactttcattgatcccgctactgcttatattgacagtgatgtaaaaattggcaatgacactattattgaaggtaatgttgttattaaaggaaaaacaactattggtagtgaatgtgtaataactagtggctcaagaatcgttgattcagaaattggtaataatgtaactgttacttcttcaacaattcaagaagcggttatgcatgataatacagatattggccctaattctcatcttcgaccaaaagctgagattatgtctggcgctcatattggtaactttgttgaaattaagaaagctataattggggaaaatactaaagtagggcacttaacttatattggggatgcaactttaggtaaggatattaacgtaggttgcggtgtaatcttctctaactatgacggtgttaagaagtttcattcaactgttggtgatcatgccttcattggtgccggttcaacaattatcaatccgattaatgtcgcagatcactcatttattgctgctgattcaacaattactaaagatgttgcccgctatgaaatggcaattgctagaggtcgccaagtaaataaagaagattactggcataaattgcctcttgcccaggataaggactggcaataacaaggagaataagtaaatatgaacaccacattgatggcgtttcttggtttagccatgatagtcacattcatggctttaattatggctaagaagttaagcgcttttacaagtttagtaatagtcccaattttatttggagttttagctggctatggattctttgatactttgacctatgcaatggcaggtattaagtcagtagcatcgacttttgcaatgatgacttttgccattttgtattttggcattatgctactgacaggattatttgatccaatggttgataaagttgttaaatgggtaaaaggtgatcctttaaaagttctagttggaactgcaattttatcagcttttgtttcattagatggtgatgggacgactactgttatgatcgtatgtactgcgatgataccaatttttgatcggttaaaaatcaaaaaaatctatcttgcaactttaattatcttaaccaatggtgttatgaatctgattccttggggtggtccaactgcgcgagtaatgactgtgatgcatttagacgcaagtaaaattttgccaccacttttaccaggaatgattctttcaattatttatactcttggtgtggcttattatttgggcaaaaaagaacgtaggcgtctaggtgttcaagaaaatgttgaacatgtcgcagagcattacgaatcagaagaagaggaagaaaatctaaagcgacctaacttaatttggttcaacttaattttaacgattgctttagttgcagcattagttttaggtaaggctgatagtgcaattttatttggctttggtgtagcgattgccttagcatttaactatccaaaaggaaaagttcaaagacacgtgattagccttttagctcctgaaatgattagtgtggttattatggttttaggtgctggtgtcttaatgggggtattaaatggccctgtaaatgtaaagggcgaatatgtttcagggatgtcacatgcgattgccattgtattaactcagatgattccaagttcatttggaaaatactttgcaattattattgccgtaatttcagcaccaggtacttatcttttgaataatgatgctttttactatggagttttgccaccactagctgcaactgccaaagcatatggatttagtaatttgcagattggttttgcggctttgatgggacaagcattccacttccttagccctttggtaccatttatatatttgttaatggacaagaccaagattactttaggtgaatatcaaagttacattttccgttggtgcattggaatatttatttgttttatggtagttggccttattttgggatatttgccaattctttaataaaaaagacaagcttttctttgagcttgtcttttattttgctaaaatagagtatgatagtgttattttatggaggattaaaatgtcttacaaagacgatattaaactttttgcgctcaactcaaataccccattagctcaaaagattgctgatagaataggtgtaccccttgctaagtcaagtgttcaacgctttagcgatggagaaattcaaattaatattgatgaatcggttcgtggtaaggatgtttacttaattcaatcaacaagcgctccagttaatgacaatttgatggaacttttgattatgattgatgctgttaagcgagcaagtgctcgagcaattaatattgtattgccatactatggctatgcaagacaagacagaaagactcgtgctcgtgaaccaatcactgctaaattagttgctaatatgcttgaagcagcaggtgctacaagaattttgtctcttgatttacatgcaccacaaattcaaggcttctttgatatcccagtcgataatttaatgggggcacctttattagcagattatttcttatctaatcatttagaaaagggtgcagttgttgtttcaccagatcatggtggtgttactcgtgctagaaagttagctgaatttttaaaggctccaattgcaattgtcgataagcgtcgtccgaaagctaatgttgcagaagttatgaatattattggtgatgttagtggaaagcgtgccatcatcattgatgacatgattgatacagcaggtactatcacattagcagcgcaggccttaattgatgcaggtgctacagaagtatatgctagtgcaactcatgcagttctttctggtcctgcaattgatcgtcttaacaattctaaaattaagagtttagttttaacagattcaattaatcaacctgaagaaaagaaaattgataaattacaattagtttcagttgggtcacttatgggtgatgcaattaagttaattgaacaacatcaacctgttagtccactatttaatactcgttatcgtgaaaactaataaaagggcggctttagccgtccttttatttaattaggttctataatttttcctgttgatagtttatttgagttaaactgttaacaggttttttattgcaaaaaaagaggccatagcccctctacttacaataaaattcaacacgactcaaattttaatagattgaaggtttttctatgtcctcttacaatgattgtattaaattttcgctcgatatccaagaccctaatatcacttttaatgctcatttctttaaattaattaacggtattaagtataaggtctttcaagctactcttattcagcctgcttgtcctttttgcggttctgttaatctgattcataatggtcatcttcagactaatattagatttattacttctaatgctagtagtcctgtgatcatcaggttaaataagcaaagagttctctgccgagattgtaatactcgttcaatggccaaatctaagttagttaataaatattgttctatctctaatcctgccaaaagaaaagttctttctgctttaactgaggaccgttctatgactagtattgctcgtgagaataatctatctgttaatactgttcaacgcgttttagcttcttgttctcatcgttttattgataactataactatttacctgaacacttagcctttgatgaatttaaaggcgtcgataaaaagctacactttatttgtcttgatggtcaaaagcatgaagtggttcaaatcctcagaaaccgatacaaaaagtctttacttaaatactttggtaaattctctcctagtgctcgtgctaacgtcaaaactgtttctatggacttaaacttttactatcaaaatattgttagagcttgtttccctaatgcagaaattatcattgatcgttttcatatggtacagatgttaactcgctcttttaattctttaagagttttagtcatgaagtcttttgataaacgagcaaggcaatatcaactgctcaaatcaccttggaagctttatcttaagtctttcgttgatttagataagattcaccctcattataattggcacttcaaagactatctaactcaagaacaagttgtaatggaaggtattagttgtgatccaaggctagataatgcgtataatttaatgcaagactttatggctgctcttaaagctagagatactaattctttgaaagaaataattaattctaaagctgaggttggcactttgatgcacaagactttattgacctttaagcataacttacgagcagtcttaaatggtgctagattcagctactctaatggttgtttagaaggtttcaatcgtaagattaaacagattgagcgtactgcttatggatactcaaattacattaacttactaacaagaattagattagaagaaaacaaagttaaagaaaaagaaccaagcaatttatatattgcttgattctttaaatcactctttatcaacaggatttgacaaagagcctttaattattggaattattctttttagttggttttctctgatatcgaagggcaccattttttacgtatttttgaaattcttggtaaagcggatcaaaaatttgcggttcatcattttgggatagcataactttcgggaaaaagaaattttcgcttccctggatagttccgttgagtgcttttactaatggacttaactcagataattcaattaacgacccatcatcttgcataatttcaatttgactatttgcatttttgccagttggcttatatgcatcatatggttcatcaaaagcactagttagagctgtatagtaattaggatcaaagccagcttctttaatataatttttgagcttaggtactaaattgcgagtttcttgattaacactacaactagcgaaaggttttctaaataaatatctgcttgctaaatctgctaaaatttcgtcgcctgattcacgccaaatagaaaaattggtttccattacgccatcatcaagattcaaataatcttttaaagtccaacttccatccaaaaatttttgtaaacttggtgtaactaataaagtgtttgacttataaacatatcttgctctttcaagtaatttgtttaagacgacttctaatgagcgatttatacgatgaaaatatacttgttgatacatttgataacgactaacaatgtaatcttcaactgcatgcattccattattagtaaagcaaattccatcggaataagggcgaattacgcgtaataagcgttcaatatcaaagctgccatatgttacacctgtaaagtaggcgtccctttgtagataatccattctatctgcatctgcttggcttgaaatcattttaaccacttgtggattagggtaggtctttgctatgacgctggcaactgcttcaggaaaagctggagcaacctttgataaaatttgattaatttcagtagatttgtcagtaataatttgtgtgcctattttttcgtggttagttccaaatagatgctcaaaagtatgagaatatggaccatgtccaatgtcatgtaataatgcggcacattcggctactatattttctttttcattccaaaggccatcatttggtttgatagatggatattgtttgctaaatatttcgcaaattcgtctagttaattcataaacacctaagttatgttcaaaccgtgtatgagttgcaccgggaaaaacatagctagttggtccaagttgtttaattcggcgtaagcgttgaaattctttagaattaattaaatctaaaataactttatcttcgatatgaatgtaaccatgaacaggatcacgtaattctacggggtggggtaatttttcactttgaaaaaacataattcttcccttcattttatttaatttttgaagaaaaattcggtaaaatgtatacagttaaaattataacaaagaaaacgtttaagatgtgaattatcatagattgaggggtattttgaaagaagtagatttaaaatttaaaagtacaattactcaagaacaagattcagaaagctttcaaaagagtgcaaaagcacaagttgaagagctagaagatggttggcgtttaaaatatttagaggatgaccaaattcctgttaagattttactaaaaaaacaaaaacaaacgcttataattaatcgaggagtagttccaagtgattattcattaatcaagttggaactaggagaaaaacgtggctgcaagtatgtagttaataaccgccaaatggacttaattagtgaaactaaattcctaaaagttactaaatatggcggtagagtcaaagttcaagttgaatatgacctatttagtgggctatacttaataggtaactatgcagtcacattgattttttcttaagagatgcgtaaaatagaaaagatgctataaagagaggacgtttaactgtgggtttagctgattttgaaggtaagaaacgcgaagaactttcattaattgaagtagcacgtgctattttagaagaccacggcaagcgcatggcttttgccgatattgtaaatgccgttcaagaatacttaggtactagtgacgaagaaattcgtgaacgtttaccacaattttatactgatatgaatactgatggtgaatttatctcaatgggtgataatgtatgggcccttcgttcatggttcccatatgaatctgttgacgaagaagttaaccaccctgaagacgaagatgatgaaccacgtaaaaagcatcatagaaaggttaatgcatttattgcaagtagtgatgatgatgacattatcgactacgattctgatgatccagaagatgatgcagaagatgatgatttggatactgatgaagatgaaaatacagatgactttgatgctgcagatgatgacgattttgatgatccagatgacgatgatgaattaccagatggtattgaaggtcaattatcagaattagatgatgatgaagacgaagatgatgagtaattagacttgactctttgtcagtaagtctatattattttatctgggccccttattgggcacttactaatgatatttattagcccccttctttgaagggagcttttttgttttttacttaaatttttataaggagagctacttgatgactaaatatgtattcgtaaccggtggtgttgtttcttcattaggtaagggtattgtcgcttcgtctttaggacgtctattgaaaaatcgtggcttgaaagtcacgatgcaaaaatttgatccatatatcaacattgacccaggtacgatgaatccatatcaacacggtgaagtatttgtaactgatgatggtactgaagctgaccttgacctaggtcactatgaaagatttgttgatgtgcgtactagtaagtattctaatgtaactactggtaagatttattccgaagttttgaaaaaggaacgtcgtggagattaccaaggtgctactgttcaagtaatacctcacatcacaaacatgattaaagaaaaaattatgcgtgcaggccaaactactgattctgatgtagttatttcagaaattggtgggactgttggtgatattgaatctactccatttatggaagctattcgtcaaatgaagcgcgaagttggtgctgataatgtgatgtatattcacgtaactttagtgccttaccttcatgcagctcatgaaatgaagactaagccaactcaacactcagttgctactttaagaagcattggaattcagcctaatatgcttgttttacgtgcagaaaaagaagtgggccaagaacttaaaaataagattgctaactttactgatgttccagttgaagcaattatggaatcaattgatgctccttcattatttgaaattcctttgaatttccaaaagcaaggtatggatcaattagtatgtgatcacttcaacttaacttctcctaagagtaaagctgatatggaagaatgggttaagctagaaaagcgttctactagccttaaatacaagactaagattactttggttggtaaatatgtagaactagaagatgcttatatttcagttaccgaagccttaaagcatgctggctatctttacaatagtgaaattgagattaacaaagttcaagcagaagatattacagaagataatattgctgactttatgaaagattctgatggcttaattgtccctggtggttttggtttgcgtggccttgaaggaatgataacggctatcaaatacgctcgagaaaatgatattccattccttggtatttgtcttggtatgcaaatggcaacagtagaatttgctcgggatgttttaggctataaagatgctaatacaactgaagcagatcctgaaaccaagaataatattattgacttgatggctgatcaagaaggccaagatacaattggcggtactttgcgtttaggtctatatcctgctcgcctcaagaagggtactaagacttataaggcatatgatgaacaagaagtaattcaagaacgtcaccgtcaccgttatgaatttaataataagtaccgtgaagaatttgaaaagcatggtatgatttttagtggagtttctccagataatcatttagttgaaattgttgaaattccaactaaaaagttcttcattgcagcacaataccatccagaatttttatctcgtcctcataaaccagagggcttgtttaaggcatttattggtgctgctagtggcttagaagaagataagttttaattgtaaaatacaaaattcttaaaaaacaagaggtttagcacattcctcttgttttttaatctgatttcttataacatttacaatgacacattgacaaaaagaaaaggattgttttccccgatgaagcagatgattattcatggcggaaaaccactaactggtgaagtttggattggtggagctaagaattcaactgtagccctcattccagccgcaatcttgtcacatactccagtaactctagaatgtgtaccacgcattgcagatgtagataacttgatggatttgttgaaagaaatggatgttaagtgtgatttcaaagagaccactttacacattgatccaacagaaattaagatgagtccacttcctgcaggtaaaattaagagtttaagagcatcatattactttatgggtgctttacttggtagatttggcaaggccgtagtaggttttccaggtggcgatgacattggtccacgcccaattgatcaacatattaaaggctttgaagctttaggtgctattgtaaaaaatgaaagtgaccaaattatcattaaagcaccagaagaaggacttcatggtaatcaaatagacttagcgatgccatcagtgggcgctacgatgaatatcattatggccagtgtaactgcacaaggtcagactataattaataatgcagcgaaagagccagaaattattgatttagcaacttttttaaataatatgggtgctgttattcgtggtgcaggtactgaaacgattagaattgacggcgttagtcgtattgaagctaagatacctcatacaataattccagatagaattgaagcaggtacttatatttcactagctgcatgtattggaaatggcattcgaattcataatattattgaagaacacctagattcatatttagccaaagtagaagaaatgggtgtagtcattgatgcagatgaggattcactttacgtatatccagcaggcgatttaaagatgattcaggtcaaaactgatccatatcctggttttgccacagatttgcaacaacctattacgccccttcttttgactgcaaaaacaggcgaaggtgtagttatagataatatttatcctaagagaactagacacattcctgaattgcagaagatgggtgctaatatcaaggttgaagataatattattttggttcatccaactagtgaattacatggagcatgcgttcacgcagatgagattcgagcaggagcatcattaatgattgctggtttaatggctgatggtgaaactgtaattgataatgcagataatattttaagaggatatgatcgtgttgaggaaaagttacgtaagttaggcgctgacgtaactattcaagatgcataatatttagaaagcttacctagtttacgggtaagctttcttttatttgatataggggtataagtttgaaaaaagatgcaattaaagcggtctttatcaattgaataattggcaatattcttcgctagaagtagtagttaagcttagttttactgattgggggattgtatttcttgaaaagcttaaacttgtattccttaatatcaaaaagataataaaaaaacgttgataaaccaaagtttatagaactttgattatcaacgtttttgtataacaagagttatttctcttatttattaatctggcaacttaaaaaatgaatctaaacatatagcaaccctcctttcttataaattaagcttatcgatatattttccatgaattaatttggagtatgtattcaataaatctttaggaagcttctttttttgtgctttttttaaataagatactatttctgaatagctagtatctatatcaatgtttttcataaaagaaatataagtatcaggataaactaaaaaataaagaaactgagcaagactaaatctatcaggaaattctacaatagactgctcataaggattataaaaaccataagtaccagcaggattaatactatttttggcaaaacaagatataccagatttagatattgcataattaaaatctattattttggcctgtttatcttgagataaaataacattactaaaggataaatctctaaaactaatctctaatttatttagtttattaattaaaaatagtatctgattgaatatattcaacctttctttcagagacaaagtgctaagtttattggacatagctaattcatcaagtgattcaccttctataaattcagtcacaattacaacagaattatcaagatagaaggtatcaataatattttcaaagccggaatcttttaaaatctcgtttgtatttagaatattactggaacttaataacctatcagcttcatctatgttactactttcaatattgaaatatttgcatgcataacgaataataacttttttcataaatttaacatcaagtcctagaaaaactccagagggaccaagatgctttaatacttttaatattaaatatctagatggtaatttatgataatgttgtaaatcataatctggtattttttgtgcatctttaaaaggatgcaatgtcttatctctatgatctatattttttatatcactaagtagggtaccaaatcgatagtaaatgttagaattcaacttgtaggatttatcagaacctacagctatacctatttcattatgaaagtaatagtgtagtatttctaaagtttctaatacattttgtggtttaggataaatcgttataaatttacctacttggctattaccataataaccaagatttaatcgttctaattcagatattgaagcaattattttaaaatcccagcattttttcctgtttaagttaaaaaaacgttgagcaatatcaattgcatttgttaaaacggcactaatatgtattttccaaccatagttatttactatttgatgagggaaattgggatatgcccaaatatcactactattcaatctgcagatattattttgttttagtaacaagtcgtattcttttgataagcttaattttttcatggaataaatccttgttcttttttatttgagtgagctaaaagatataaaccatcaatatatctagttattaaataggaaatagtctcatcaggaattttagcattgcgaagtactttagctagttcagatatactatatctttttgagtgttccaatttgtacgactttatgataaagtcattaaacaaatcataagattcactacgaatatgcaattcacaattagattgaaatttagatataaatatttttaataattgaactaacgttttatcaacatctctgtataattccgtagcaaacataatcctttattcaaaagtcgttgttgttctattactactgcaacgttgactatgtgcacctgatagtgcgcctgctgcttgggttgtagttaatcctaaatcatttaatgctgcaacatcacgagaaagaagggcagctttttcttcttttgaaatatcaagcttttctaaaaatgaccttggattagctagaaaatcgccaataaattttggatcactttgtaatcggtcgattaaaattttaaattcttttgacataataatgtcctcctttttttaatttgacataatattatcaccaggatacaattaaattaatattaaaattaataaaaaataaaaagggaagattaaatgattgttgcaaacaaactaagaatcggctacaaaacaactacagtagttaatgatttaaattttaaattagaagaaggtaaatttattgctttaattggagcaaatggtgccggaaaatccactttaattaatacaatgattggaattgttaagcctttagctggaagaattaactggcaagttgaaactgacaaaaagaatccgtttaatgctgtaggttttagtccacaaagtcaattaattgattggtatactaatgtttttgataatgtaattcagggaccacttttagctggttataagatgagtgtagcaaagaaacaagcagagtttgccttagaattacttgatattgttgatttgaaagataagccagtagaccatatttctggtggacaacaacaacgggtacaaatagcccgggaaatagcccgtaaacctaaaatttatattttagatgaaccaacgactggattagatgtcgaaactggtgagaagctctttcgttatttacaaactgaaattaaaaatggtgccttagttttaacttcctctcatgatttaactttattagaaagttatgcagatcaggttttatttattaatgaacatgaacaacaattctttggtagtttaaaggcctttttagctgacggtactagcttgagagataaatatttgcaagaaagaggtaactaaatgaatcctgctaattttagaaatatttcactgggactaagatcaattaaaattgtggccaataatgaatggcgcgcttttgtccataataaaggcttgcttttatcaatgtttatgcaaccactaattacttatggcttattggtaatggccttaaatgaaaatttgagtgcagtgcattatgctggtcttactcttccatataagcaatatgcgctaactggggttttgactttctttatgacgacgcaaatgtcacaggcgatgtatcgggcaactgttgataaagagtatggtttactggcaattaaatttactaatggggtacaaccttggcattatcttgctgggatgagctttttcccaattatcggcttactgttccagagtgcaattttaatcgttttagggctattaactgggggtgtttataatttattgtacttacttttatcactcctagttttaattgtttcacttgaattttggtcaaccctaggcattattttaagtactagaatctcatcatatgagcaacgtgatgtgataatgactttaattttttcaccaatttcatatgcagccccaaccttgtatgttttcagtgataattcaccacttattattaaaattttgtcagcaatcaatccattaacttatcaattaaaggcactcagagcagtggcttttggtagctttaatttgatggaaattgtaagtgcaattttaatttcaattgccatgattgttttggctcaagttattttgaaacggatgccattgagtttagctgagagataagtatagtgagtagctcattgtatttaaataatccgtccgaattgaaaatttatatttatcttcatggaggtccattttttattcttgaaaatttaaatgatgatccatttactcactattttaataagatgttgaaaaatatttttatcataaattatcctgtagtaaaaagacaaggtggagttatagattttcaatatgtttatcaagaaattgaaagattaagaattgaaaaaactaactatgaactttacttaataggagagagttatggtggatatctagcaagcttattttcaaagtataatcttgttgaaaaaattatctgtataagtggatttgttagtataaaatatcaagcgttgttttcatcagagagagtgtggttaacatcctatttgtcacctgaagcatcagatttttatgacatacataaaaagaatttggtaagaacagcgattactttttttaatgggactaaagatatgcaaataccatatcaacaacttttaccattagctagtaatgataaaataaaaattgtattattagatggctttaaacatagagaagctaatcaaaagatggataatttgttaaaaaaggtgcttgatttattagattaaaatatatacaaaaaatgttgataatcttggttacattattgaagttaaccttgattatcaacattttttattgaaatctatttttattcaattgtttttagtatttgcaagtaatcttagtcaagtaagtcgtatttcaaagtcattaaaccatgaccttcatcaaccatttgaccaagtaattctactgtattgctataaacaacttctgccattttatcatttgcagcttcaagtttagtttgtaagtctttgccagacaaatctttaactgctgcatcagtatcgtgttgaatcttgtggcaagctgctaaactcttttgttcaaagtcagcttctaattcaccatatacgcgatagttagtatcacctaattgagctgctaacttatttacccagaaaatcttggttaaatcaaattgagaagttgtttgccagctagctggagtggtagtgatgttggtgtagaaaggtacaaaagtgttgaaagtgttaggaccaaatgccaaccattgaacaccagcaatttcagcagggacattgtttctaatttgcaagacgtgagtttcaaaattacgattaattccgattggacggaaagtcttcttttgttctgctgttccttgttcgccataggcatcataaggggtgtcttggtagtgagagctttcagcccacttaatatcttctaagctaattttacggttagcatggcagatgaatggttggtcttgatcgctaggcttaccaccgaattcagggttaaagaagttgtgaatataccaagcacgtgggttattgtagtgggcatctttaatagtagatgaaccaaaaatatgacgtaaattgtaaccttcaaagtcaggatttaagttataattttcgattaattcttttaagtcacttgaacatacaaaatctggatcatcgaacttgaattcatcaatgttcaaacggttaggagcgattacataagcatcatcagggatgcgacgtgctgcccagtggtgtccaccaatagtttcaagataccaaatttcatccttatcagaaaaggccataccgttcatttcatatgtgccatatttttcaagtaagtaaccaacccgcttaactccatctctagcggagtggatgtaaggcagggttaaagtaacgaaatcttcttcacctaatccaccttcttcagtggtcaaaagtggatcaatcccttggattcttgagttagtagtaattgtttcagtagcagtcatggcaatgttttcagagttaatacccgctgcagcccaaatgccatttttgccagaagcatcaggagcgcttgtgtaacgaaggggtgttaatgctaaatcttcatcatctatcacttgcttactaatgacgctttggtaatgcttaggttgttgctctgggttaacgactttaaaactttctggaataatagttctaccaccgtcttcacttcgagcaatcatagttgaaccatcaattgtggcttttttaccaactagaatagtggtacattcagtttgttctttcatatgcatttccttcttctttttaacttaattccattgtaggagaaaaagctctaggataaaagaaaagcttgagttaaatactcaagcttttaaaaaatatataattactactttgaatttaatccttctttacctttgaaaattagattcaaaagagttgcactaaggctggcaaccacgataccgttccctaagaataattgaacagtttgtggcaaatgttggaaaatttgtggataagaagttacccctagacctaaaccaacagaaagtgcaattactaaaatgttgcggttatcacttaaatcaacttttaggagcatcttaattccttgaactgcaatcatagtgaacattactagcattgccccacctaaaacagagattggaataatagttacaatggcgccgattttaggtaataaacctaagcccattaataggccagcagcccaaaagattggacgtctagttttaatgccagaaagttggagtaaaccgacattttgtgaaaaggtagtgtaagggaaagtgttaaaaatcccaccgaatatttgagccaatccttcagcacggtagcctcgtttaagatcatcttcgttaacgtcttgctttaacaaatcacttgtagcaaagaaaacaccagttgattctaccattgatactaaggcgatgataatcatcgttacactagatgaccattcaaattcaggcttaccaaagtagaaaaactgtggcaaatgaaaccatgaagcttgtaaaacagatgtaagtgagaccattcctagaaatgaagctaaaacagtaccagcaattaatccaattaaaaccgcaattgattttaaaaagcctttagccagtaattcgattaaaataattaccaaaattgtcgcaaaagcagtgattaagtacttactgtcaccaaaatttttagcagtggcagttccgccacccatattttgaaaggcaaccggaattagggttaacccaattactgtaatcaaactaccagtaacaactggtggaaaaagttttttgatttttgaaaaccagccggcaatacaaaagacaaaaatcccagcaacgataatggcaccgtacatagtattaattgaaaatttttgcccgattagttcaagtggagccacagcttgaattgcacaacctaagacaacgggtaagccgattcctaaataacaattacggaataattgcaataaggttgctaatccacacatgaaaatatcaattgaaactaaataagtcatttgtgtggtattaaattttagggctgttccaattaagagaggcactgctacggcacccgaatacattgcaagtaagtgttgtaaacctaagatagctgcttttttgtgagatacttctttcattattcctctcctacgaagtgaacttctccattttcaaaactagcaatattagctaaggcttcaaagcgtaagccttgcttcttaatccagtcgctaccaccttggaaatctttagcaacaactgcaccgacaccgacaatttctgcaccggcttggtttgcaattgaaaccattcctttaacagcttcaccgtgggcaacaaagtcatcaagaattaggactttatcggttgcactaaggaatttcttttctacgcaaattttgttattaacttttttagtgtaggaaaagacatcagctagataaactgcatcatttagagttgatggctttttcttacgggcaaagaccattggtacacctaagacataagcagccattacacttggcgcaattccagaagcttcacaagttaatactttagtgatgccagcatctttaaataaacgagcgaattctttcccgagctccatcatcaattctggatcgacttgatgatttaagaatgagttgatttttaagacgtccccatcaagcacttgaccatcacgtttgattcgctcttctaataatttcacttagtcttcctcctaaaaactaaaaacaaaaaaggccccttctaccatgactgtggaaaaagaagccttttaaaaagccaaaatatccatagtctgaaatttaaggtttcaggtagaaactgttgcccgtattgcaacgatatacagataataaatctcattaataaaaagtgttgtttgtattctagcaaagataattataaaattcaactataaagtaaaaatattggcgtaaaaagcaaattatattttacactttttaaattaatatttgctttttagttgaccgaattccaaaaaattagtatagtcaggataaatttgttaagcagaaaaggagaagtagggtgtctgtaaaaaatatatctgactttgataaaatcattgtgctagactttggtagccaatataaccaactgattacacgccgtctacgtgactttggtatttactcagaattattaccaaatgatttttcaattgaaaaaattaaagaaatgaatcctaaggggattattttttcaggtggaccaaacagtgtttatgatgaaggtagcttaaaagtaaatcctgaaatttttgaattggggattccgattttaggcatttgttatgggatgcagttaatggctcatgatttgggtggtaaggttgaaaaagctgatcactcagaatatggccgcgcagatattgacgttacagacgctactaagttatttgaaaaattgcctgcaaagcaaactgtttggatgagtcatggtgacttggtaactagtgttccggacggttttgaaactttagcatctagtcccaactgcccaattagcgcgatggctaatgttgctaagaaattttatggtattcagttccatgcagaagttcgtaattctgaatatggcttagatattttgaagaactttgcttttaacgtttgtggagctcgtgctaactggacgatggacgacttcattgacctagaagtagctaaaatccgcaagcaagttggcgatggcaaggtaatcttaggcttgtctggtggggtagattctagcgttactgccactttacttcataaggctattggcaaccaattaactgcaatttttgttgatcatggtttacttagaaaagatgaagctaaacaagttatggcagctttgaatcgtgatttaggggttaatatcattaaagtcgatgccaaaaaacgcttcttaaataagttaaagggtgttagtgaacctgaacaaaagcgcaagattattggtaaagaattcatcgaagtcttcaatgaagaagccaaaaagcttaatggtgtaaaattcttagctcaaggtacgctttatactgatgtaattgaaagtggtactaagactgctcaaacaatcaagtcccaccacaatgtagggggtcttcctaaggacttaggcttcgagttagttgaacctttgcgtaagttattcaaggatgaagtgcgtgaacttggtgaaaagttaggcattccacatgaacttgtttggcgtcagccattcccaggaccaggtcttggtattcgggtaattggcgaaattaccgaagaaaagcttgaaattgtccgtgaaactgatgcaattttgcgtgaagaaattaaaaaagctggtcttgaagaagaggtttggcaatacttcacagtcttgccaggaattcgctcagtcggagtaatgggtgacggcagaacatacgactacactattggtattcgcgcagttagctcaattgatgggatgaccgccgacttttcaaagttgccatgggaagttttacaaaaggtatcaactagaatggtagatgaagttgaccatgttaaccgcgtagtctacgacattacttctaagccacctgcaactattgaatgggaataagatacaactcgttagcaaggctaacgagttttttatttacaatctctaaaaataggtatataaaattaagaatatacaattacgttgtaaatataaattaaggatgcgaaatgtaagtgactccattagtctttaatactcaaatagccaaaggcaagccctctaataacgatggctgtcctttttgtgatattgaaaaattaacaggaattattgaaaagcagaatcaatttatttggctggagaataaatatcagactctgcttgatacttatttaactttgattattgagtcaagtgatcatttaggagatataaccaactattcgtatgagtataatcgttctttaattcactatgcggtagataagtggcttaaattagataattctaagcaatatcgaagtgtggcaatgtttaaaaattttggccctttgtctggtggtagtttgcgccatccccatttacaaattgtcggctttaaaaaagctgatatttattcagaagttcattcagaaaattttactggattatcaataaaaaaaggcccaaactttgaagtaaatatgtcattacaaccaattatgggatatacagaattcaatgtaattatttctaatatggataaattagacttattttcagataatattaaagacttagttagtttttgtatgagcgaagccttttatcagggaagatgtaagtcatataatctattcttttatcgaattgatggaaaagtaatttgtaagttagttccgagatttataacaccaccatattatattggctatcgccaatcacaaagaaatagcgatattaatttagaaaagattaagaccgacttttttaactatattgaaaattaaaaatacgagcgaaaaatgttacaataataatgatttgattgatttttgaggagttgattgtgattaagcttaataaaacttcgattgcttctttattggcaatagctttagcaatagttttggctaatacagcaatgttagatcaagcaaaaactaaagaagttgcctcatcatcattgaaagtaacaaaatctaaagcaaataaggcaaaggaaatcaaaattaattggcaaaaaccttctgaaaataagccgtatcctaaagttgctgattatcccaagatgtgggttaaagtttctaaagctaaacaaagaacttatttaatgaatggatcaaaaattttatacactatgtattgttctactggctctggtggagatcgagcaacgccagaagggacttttcatattcaggcagaacgtggagactttttctacaatcaggaaagtggagaaggtgcaaagtactgggtttcttggaaggatcatggagtttacctatttcataccgtacccactgattctcagggacattttgttgaatctgaagctgaaaaattaggtaaaaacgcaaattcacatggatgtattagattatcagttcctgatgctaaatggttttatgaaaatattaaagaaggaacaaaagttgtaattaccaatagctaattttagtggggatagattggtgaagctaataaaattattacttactaagcattatgaatttgaatcctggttagataattatttttggctaagtcatttggttaaggcaaatcgtttatatacagcaggaattttgctttacaactttatatgtttattttttacgcaattactttttgtaggttggcgtgaattttttattattttggtcttattgaatgtagttttatttggtgtgcgtttttttgaaataaaaaaataaaagactaggaattttcctagtctttttgtatggtccttttaagggagttaaccttatttattttgcatttgcgcttgcattagcatttgttttttctgcattgcgatcatttgcttctttaacttagtgacttggctagttgagagtactttccaagtgtttggcacttcaaaagtatttacacgttgctttagctgattttctttacctaaaaagccaaagagtaacttgtaaaacttatttttgaagtgataacgagtttcttgggtaacaagcgtagcagtagtgtagccagtttttactttattgatagttttggtattaacttgagtatgcttctttttaccattgtaaatataaactttaggtcctttattgccgacttgtttataaactaagaggtttaattggccaacgctagcagttggcttgattgtaacttgtttattagtagtcttggcttccatcccaaaatgagcattttcattggccatcatgccaatcccgctagttaaggcgagtgctaatcccaggtaagcaaagaggtagtggaatttagtaattggaatcacattgaaaataaagtaaattactaagccaataattaataaaagaatagccattatcttgcctccttaccattagtgatttcttcttttttagcgatattaccttttctcaaaaatagtgcagcaaagattagtaaaactgcaaatacaattgcaaccatgaaggcagctttgtagcctaatatcacagcgtcaatagctttatctttatatgctaaaggattttgagttaatagactcttagccggagtgtttgaattagcaacattggtcaagactgaggttaaaattgcagttccaattgaaccggcaacttgacgcactgtgttgttaacagcagtaccgtgggtcattaagttaagtggcaaagcgttcattccggcagttgtgaccggcatcatcatcattgcaaccccaaacattctaactgcgtaaaaggccgtgatgtagatagtaggagtattaggaccgatgaataagaaggcactggtaccgaagattaacatcactgccccagtgataaccatgtgtttagcaccatatttatcaaataaacgaccggtgattggtgacataacacccatggcaatagcacctggaagtaagattaatcctgattgtaaggcacttttgccaagaacattttgaatgtaaaggggcaaaatcatttctgcagctagcattcccatataggataaactactgatgattgtacctaaagtatattgaccagttttaaaaacattcaaattcaaaaatggttcttcaagcttaaattggcgaactgcaaataaggcaacaattgctgcaccaataactagggatgcaatcacagtggtatcatcccagcccttactaccaacttcagcaaaaccataaagcataattccaaaaccggcaattgaagttacaactgaccagaaatcaagcttcggactagtattaggcaagacatctttcattaagaaaaaggctgcaataataactactgatataattggaataatcatgccgaataaatcccgccaggtaaagtggtcaacaatataacctgataaagttggtccgattgctggtgccattccgattgcaagccccattgttcccatggcagcaccacgtttttcaggtggatagatcattaagacaattgattgcattagcggcatcgaaaccccggctccgatagcttgaaccaatctacctgcaagtaaaacttggaagttaggtgaccagtaagccagcatagttcctaataagtaaataattagggcgctaatgtacataaacttggttgataatttgttaattaagtaggcgctgactggaatcataattccgttaactaaggtaaatccggtagttagccattgcacagtgcttgcatcgatgttgaaagttttcatcattgatgggtaagctgtagctaataaagtagccgttaaaattgtgacgaatgaaccggtaatcagcacggtcatcaataaagtacggttgtatttattaccatgaatatcagttgataccattatttaacctctttctttttttgcaaaagatttaacttttttgtaaaattatttaacaatttaaaattgtaaaattaaccgatatatttgtcaaatgattttacaaaagtaccaaaataaattagaattaagttataatatttatcacatataagctgtgcttaacttggaaagattggagacaattatggtaaaaaaacataaaaactttttaaaattactcgataatattcaattaagcattggcgatgtaagcgatggaattggagtaagtcagcgtcaactacgttattgggaagaaaaaggctacataaaaccaatttctgataacgaaaagggagtaagaaaatataatttcttaatggctggtagatgtgcacaaatcaaagaatatttagacgaaggttatactttgagtaaagcatatgaaaaaacgattgaagttgaagaaaagcgaaaagtgattcgtaatttcttatttaaacagcacggtaattttgaagtagagataactgatagtaagcaatcatttggcgaaattgacttgggagcaactggtgaaggcaaagaactctatggcattgttaatgcagatggagttaaatatgaattacggtaaaaaataagatcaagatttcctgaattggaatttcttgatctttttttgtcttattttctaaataattcttccaagctgtcacaaatgtcgcggctaactttatcagcttcaatatcaattgctaccttaacatttggcttagccttgcgtaaatcttctaagcggcgaattgttctaccgcggctagggccttcagtttcacaggttaaatgcattgacaagaaagtgaaccattctgggtgaattgctgcacagaccgcagcagggtcatgaagactaccaccatgcaaatatggtgaatatttatcataaatatggatgtagtagtcaacaatatcagcgtatttttcaccaactgtggtttgagtttcacgccacttttgcgtatcagctaaaccgattggcgttttcattgtgacatcaaggccaaccataattacaggggtgccactttcaaataaaatcttagctgcaagggggtcttggttaatattagcttcagcataagggctaacattaccgcgaacagtcaaggctccacccatgataacaacttggccgatttcatctttaaaagtaggatatttttgtaaaactaaggctaagtcagtcattggaccagtagcaataacgagtaaatccttgccatacttcttagttgcttcaatgatgaagtcaattccactagtagtttcaactggacgcctagctgctgggatacttacttgcccaattccgttttctccgtggatatcagcgctaacttccattcggtcgaagtgatcttggtcaatggcgtgatcatttcccaaaaagacgggaatgtctgttttacctaacattttcaaaagagctagggcatttttagcaccttgttctgtgtagacattaccgtaagtgccaacaactccgattaagtcgagctcatcttttgcgatagtgtaggctagcgccattgcgtcatcaattccagtatcaagggataaaattacttttttcatggtgaagtcctttctaaaaaacatctacgttaatcatactatgtttggtatatttttgccgtagaagttaaaggtacaaatttaatcttaagttttgataagtgctacaatatataattgtaaaggcttgcatatatggaggaaaagctatgaataaaagcaaataaaggtagaccaaaattctaaagttgctactaaggtagttaaaccggaaaataaattatcattagctaaagtaagtagtattaataagcaacatttaccacaaacaggcaaccacgtgactgttttaggtgctttaggaatgcttttggtaagtttaggtttgtctttagggttaaaacgtaaggataattagttgtgaataaagcgtagaaacctttgaatattctatatataactactgtgcttagactctaaaataatattaataaggtacatattcatggataataaaagaatttcgagaaaagaatacaaaaataacttatttcaaaagagaaaaccaaaaaatatatttttgagatatttacttattggatttgatgcaattttagaagcttttggcattggagaagaggataaataatattatagcagttatataagtttatttttgctttatataattattttgcaatatgagatactcagacttctatagtgttgggatattactcaattaatatatgaaaatatggtggctttgatgacatattattccaagacgatactttataagacgtcaagaagagcagattattacaacaagcaatcagaacctcttcaaactggtagtgtttcagccgatgtattagcaaacttaggtatagtttttgttttttaagaaaaggatagctaaatttgattaaatttagctgtggagaatatcttttcagataaataaacaagacaagacttcataattaaagaaatcttgcctttttttatgaatccttaaaactgtatatagttggtaactttatttcaatagagcaaaaagagttaaaaacaaacaagcatttttatcttaaactaaagctcaatttcaccggattatgatccgcataagcgaattgagtatcgatattgtagctaacagcttggacattaggcgaaaccaagaaaccatcaacgatagtggtataggttacgccttttttgtatggaatatcgctaccgcggcaggttggcacatcatccgcattttgtgcagtaatcattctcatgccactacttgccaggtctttttgacttaagacagctagccagtcgtgctgcttttgttctgacttaaaatgcgcaacatatttggtaccaaatgcatggttaaagtcgccaccgcagatgacgtagttgcctttttgaatttcagctttcataacgtgattgagcagggcaagttgctttttcttagataagccacccttgtcataagcggacatgtggctgttaattaagaccagctctttgtcgtttttgactggtaggcgcatgacgttgaagcaacggtcgaggtcaacgaacttttcaattaagcttgagctgacaaagtatttccggcgctcgctactatcaatgtggtatttacttaatgccaagataccactacgagcaaagccatggggattattcagggggaaggcaatataagcactgtggaaattctgtgcaaaactgctgcccatatcatcgaaggcgttttccgccattttaacctggttaacgccaaaagagcgagttgaattagtatctatttcttggaaaaaggcaaagtcgggattttgctttttgattgtggcaattgcacctttagtatcagctagttcactcgcttttgagactgcagttccatattttcctcgcgttttggccccatttttcatttcaccagtatccatgaagaaactgtacttgggattataagcaccaaagccgacattataggtagttagagtgtaagttttatttgtagctagagttttagcttggttgttcttgatgtgaataacttggtggtcagggatgcggtagtaattctcttgcatgtaaattgcatagcctagtaaagtaataataacgattgctaaaagtcctagtagacttcgaattgtatacttaattgcttttttcatagtattctcctcaatggagcttattatacctataaagtttcttagaaaaaagtgtttgtagccatataatggatatcattaccaccttcagctgcattattgttaaacttaaactagaaagacatatatggaaagaagggggaaaatatggttaaacaaacacatttggtaattgaccaagttaagaaaagctaccgtactaaggaagttcttaaaggtatcagttttgactgtaagcctggacaaattaccggtttaatcgggaagaacggttctggtaaaactaccttgtttcactcaattttgcatttcttagattacgagggcaaaattacactcaatggtcagtttttttctagtgcagactacaatatagttggctacctaccagaagagcgaagcttgatgccaaaactgacagttttagagcaagttcgctatttagctagtcttaaaggaatgagtaatagtgatattaaagccgccttgccagcttggatggagaaactgcaagttgttggtaagatgagtgataagattaagtctttgtctaaaggtaaccagcagaagattcaaatgattgcgacgatgattcatcaacctcagattttgattttagatgaaccatttagtggacttgatcccgttaatgtcgacttgatgaaagatattatcttagaccaggctaagcgtggagctacggttattttttctgaccataacatggataatgttgaacggctctgcgacaaggtggttatgattaatcatgggcaattggttttaaatggcacaattcaagaaattagagatagctatccaaaagaatatctctatcttaaaaaagctggtttaaaccgtgagcaagtggcaagcttgccaggttgtgaatcatttgtgcagcgccacgatggagtctgggcaattaagttaacagatgaaaaatatggcccagaaatttttgacttgttatcacacggtgaatatattcaaaccttcagtcaagaagcaccaactttagatcaaatatttaagatggaggcggcaaaatgaaaaagatttggttagttacaaaagaaacttttattagacagaccaaaggaattacctttattttgtcagttttagctccagtgatatttatggcgattatttttggtgtcgtctttattagtcaaaagctaagtggcagtgataatcagattgacaatgccatcgttattagtaaaaactatgcccctgctgttaaagatttaagtaactttgaagtgaaatctgaagctgcagctaaaaaagcattagctgctgaagaaattaagggctatgttaaagttgacgttgcaaaatctggccaaatctccgcttcctggcttggaaaggaagctatggatagtggagataagtctaacttaatggctagcttacaaaagctgcaacaaagccttaatatccaagctactggtttaacagcgaaacaattaaaaactttaaatcaaagtgtaaaaattagtgaaaagattagtggacataatggcttagcaaaagaggctactaaggcagatttaaccgcaaagcaagctaagagcattgctgctaatgtctttatctggctaacttactttattttacttacttatatttctacgatggctcaagaaatcgccactgaaaaaggttctaagattatggaaattatcttctccagcatgcgtggtggggattacttcgttggtaaagtattaggtgtattaggtgtctttttacttcatgttttagcctatattgcccttttaggcgttgcagttattgccgggccgcaaattaacatgtttgctagttttttcaagagtaatcaagagttaatttcacaagtgatgaataaccttcttagctggaatttggtattattgctactttcagtgattttgtcaattgtcattgcagccttttgtggcgctttagctaatagagtggaagatttacaaaaagttcttgctccaatcatgtatctggtaattatttctttagttgcagcgccaaatttgagtaaaggtgatagtttatttgctcaagtaattagctgtctaccactattttcaggctttatcttgccaggccggattgcagaaggtgtgtctggtacgccagaattagtgattgctacgataatttcagtagtgactttgatacttaccagctacttggttagaaaggcttatccaaagctaattttacaaactgatgatggcagtattattaagaaaattaaacgcctaagaggataggagagaagctttagtgagttaattcactaaagcttttttgttaaactatatttattaaagattagaaggtgaaaagatggatcgcagtgaaaaagttgtcttaactaacatgtgcatggtatacgatggcagtaaaattttagtagaaaaccgtgtcaaaaaagattggcctggagtgactttcccaggaggacatgttgaacatggtgaatcaattgtagattcgacagttcgtgaagtaaaagaagaaactggactagatattaaagatttaaaaatttgtggtgttaaacaattttttgatgatgatattaggacaattgtttttttgtttaaaacaaatcattttgctggtaaattacaatctagtcgtgaaggcgaagttttctggattgaacgcaaggatttagaaaattatcaactagctgatggcttcgatagcatgctagaaatttttgaaaatgataatttaagtgaaaattgttggtacttaaaagacagtcagtggacttataaaaatgaataaagttagttaccctgaattctcagaactaatcaactactaccaagcgcttactggaaatgaattaattaataagcagaaaaaacagttacttaaaagcttacgtttagctaaaaaaggtgattatcatcatgctctagcagatttgcgaacagaagcagaaaaattaactaagtattggctagagcaaaagtatattaaacctgatttgaactttaatcagaatattagtttattacgtcatagtggtgtaagccagaatgtaattaatactttatttgaaattaaagcagcaggtaataaagcggttcatgagctagaggcgaatgaagaagttactaaaaagtgcttctatgactattttaaagttttgaatacttgttcacggcaatttgtgaatcaagagagttgggttatagaaaaagcctttttaattgttgtagttattattttaggcctatttttactaaaattaggtcaaccaaattaaagagaaacaattgcatttatccacaattgatggtactataacttagtcgtatataatctatggtctgcaagattgactatggcaaaggagaatagagaacatgaaacaaggaattcatccagattatcaacaagttgttttcatggattcagcaactggtgctaagttcttagcaggttctactttgaatccatcagaaacaattgaatttgaaggtaagacttatccattagtacgtgttgaaatttcatcagattcacacccattctacactggtaagcaaaagtttgctcaagcagatggccgaatcgaaaaattcaacaagaagtacggtctttcatcaaaggaaaacaaataattgtatccttgcaattaagcagtccttaccggactgcttttttcttgcaaattcactttattaagaaattatatttataaatttagaggtttttagtatgaaaatgcagcttgcggaaatcgccaaggcgcttgatacaacaattgaaggtaatagtgatcctgttattagctcagttgcttttgattctcgaaaattaaatgaaaattcattgtttgtccctttaaaaggggaacgtgatgggcatgattttatcaattcagctattgctaatggtgcagtagctacactttgggaaaaaggacaccctaataaaccaggcaactttccattgattgaagtggatgatactttagctgctatgcaagaattagctaagtattatctcaataaagtaaatccagctgttgttggtattacaggttcaaatggtaagacaacaactaaagatatggttgctgcagtcttgtctaaacgttttaatgtacataaaactcaggctaattttaataatgaaattggtgttccaatgacaattttagaaatgaagccaactactgagattttagtacttgaaatgggaatggatcgtgctggtcagttgcatcatcttagctcattggttaagccggatgtgtgtgttattactatgattggtgaagcacatattgagttctttggttcacgtgataaaattgccgatgctaagatggaaatcactgatttcttaaaagaagatggtgaatttatctacaatggtgatgagccactattaagacaaagagcagaaaaaataactcaagttaaatctacttttggatttagtgatcaagatacaattcatgctttagaatttaagagttatatgcatcatgcatcttttgtgactaattcctcagagcagaaattttcaattccaatgattggtaagcataatgtatcaaatgcaatggccgcaatctgcgttggacatcattttggtgaatcagatgatgaaattgctgctagtttgtctgactttaccccaactgctaatagaatgcagtggcgtaaaggggatgttggagaagacattatggatgatatctacaattctaatccaactgcagctaaggccgttttaacaagttttggccaagtagaagttcctgaaggtgggagaagaatagctgttttaggtgatatgcttgaattgggtgctgcttctgctgaacttcatgcttcacttgctgacaaacttgatccattggtaatcaatgaagtttacctctatggaccagaaatgaagaatttggaagaagcaattaagggtaagtatgtaccagatacactacattattaccctcaagataaaatggaacgaatgattgatgaccttaaaaatgatattcattccaatgatattgtcatgctcaaagcttctcacggcatgcatttagataaagttttagaaagattactttaggagagttttagtgaaatttacagaattaggcttaaatgatgctttattaaaagcaattaaacgtagcggctttgaagaggcaactccgattcaagaaaaaaccattcctctagctttagctggcaaggacgtaatcggacaagctcaaacaggaactggtaagactgctgcttttggtttgccaattttgcaaaaaatcgacaataaagaacattttattcaagctttggttattgaaccaactagagaattagcaattcaaactcaagaagagttatatcgcttaggacgcgatgaaaaggcaaaagttcaagttgtttatggtggtgctgatattagtcgccaaattcgtgccttgaaacaaactccagctattttagtaggaacaccaggacgaattttagatcatttaaagagaaaaacagttaaattagacaagattaaaacagttgttttggatgaagctgatgaaatgctagacatgggttttattcaagatattgagagtattttggattttgccaagaatcgtgagcatactcttttgtttagtgcaacaatgcctaagccaattctaagaattggtgaaaagtttatgaaagaaccagagattgtacaaattaagtctaaagaattgactgcagatttgattgatcaatacttcgtacgcgcaaaagaagcagaaaaatttgatattatgtgtcggttaatcgacgttcaagctccagatttggctgttgtctttggtagaacaaaaagaagagtagacgagttaactcgtggtttagttgctcgtggctataatgcagctggtattcatggtgatttatcacaagctaagagaatgagcgtcttaaagagatttaagaatggaaaattggatattttagttgcaactgacgttgcagctcgtggacttgacatttcaggggtaacacacgtttataactatgatattccacaagatcctgattcttatgttcaccgaattggtagaactggacgtgcaggtaagaatggaatttcagttacctttgtaaccccaaatgaaattggttatatgagaaccattgaaaacttgaccaagaagaaaatgtcaccacttcgtccaccaacagatgaccaagcacttcaaggtcaattggcaattgctcataagcaaatcgaggatttgcttaaggcagatttaactaaatatactgaagaagcaagtgaattgttggataattattcagcagtagatttagtagcggcctttttgaagaatttatccaaagatgcagacgaaattaaagttaagattacttctgaaaagccattgccatataaggggcatggtcgtcgtcgtggccaccgtaataattttaagcatggtggcgatcgaaatgaaagacggcatcgcaagagtaatgtgcgccgcggtaagcatgattttgtaattaaaaacaagaaaaatcataaatagttaaaattttggctcaaattgtaatatttgggtcattttttgtataataaaccacaaagaaggtggcaaaatgtttcatagtattgggtcagatattacccacttgagtcgctttgaaaaaatgactaagcgagatttattcgcaaagaaagttttaacaccaaaggaattacaagtttatcatgctttaaaaggaagaaggcaactagagtttttagctggccgtttttctgttaaggaatctttttctaaggcttggggtacaggtctaggagaagtaagttttcaagatgttgaaaccctaaatgcatccaatggaaggcccattactacaagcactttgtataatggtcgaatattggttactattagccatgatttagatacatgtatcactttcgtagaattggaggattataaatggtaccagcaattcatcggccggctgaagtcgaagttgacttacttgcgattaaaaagaacttacaagaagaaaaagcacatttaaaaccagggcaaaagttatttgctgttgtgaaggctaatgcgtatggtcatggtgctgtaaaagttgccaagatggcagcgagaaatggtgcggaaggcttttgtgttgctgtattagatgaagcctttgaattacgtgattcaagtattgtggatccgattttagttctaggtgttactcctgctaatgaagcatgtattgctgcagctcacaatatttctctaacagcacctagtttagagtggcttgaagcagccgataaggcactagctaaaaaagatatggttttaaaaattcatttagcaattgattctggtatgggaagaattggctttagtgaagatcaagaatttattgctgcaaatgaatttttgcgcaatagtactcattttattgttgaaggaatgtttactcactttgctagtgctgatagtagagatagtcactattttgattatcaggttaagcgatttaatcacttaaagaatatattatcaattaagcctaaatggattcatgtagctaacacagcttcgagtatttttgacaagaatattcattcagatattgttcgatttgggataggattatatggcttaaatccttcatctaatccagctagtcctgatttggaaagtgaaattaatttgaagccagcattatcattggttagtgaattatcatttgtaaaaaaggttcattctggttatggaataggttatggttcaacttatgtagcagatagtgaccaatggataggaactgttcctgtaggatatgctgatggagttattcgtaaactcagtggctttaaaatcaaagtaggggctcattattgcccaatcgtgggaagaatttgtatggatcaattgatggtcttattacctgaaaaaatgccagtaggtaccaaggtggttatatattctaataatccagaagatcctaattttattaagaaagcagccgattatgttgatacaattcattatgaattggcatgccttttaagtgatcgcttacctagaatttatcatgaataaaacaaaaaattagctatcgatatcgatagctaattttttgttttatttaaagagtaaattgatcagggtcttcatcttttctgactgttgatcctgtttgtaaatcttctatttctgcaacaacatagccctttttttctaatttttgaacaattgtcttaagggtctcttctgatacaccagctggtagagtgaataaagttctacgtacataatcgcttacgcccaaattaccatctaaagtaatgacacttgctaaattagtgtatttagaaatgatttttgacattttgattaagttaccacgttcattatcagataagactgttaacacaaatgaactagatttaagattccaagcatctgataacatgctcaataagcggttgtgagttagaataccataaaacttgttgtcttcatctaagacagcaatgtatggcaagtctttaatgttgaagaaaaccttgaaaaagggtgaatcaactttaattgttttagttgcattttttaataagtgagtaactggtaaagacatatctccgccttgtgatttgtgacgataaatatgcattttataaatgttaccgcggaaaatggtgccactgtcatctaaaataggcacacaacgataacctgaatcttcaagaactttaagagcttcttctaaagttgccttctcattaacagtggttaagtaatcttttttgtaaactaaagatttaatgagcatgtagctgcctccatctattgaaagttatatagagtaattgtatcatatcctattgtaaaattaaataaaaattagatagttaaaatagaaaatatgcaagactttgggaataaattcgtctttatgctaaaattaataagaattaactagaggagttattaggaaaattatgaaaataattgctggattaggtaatcctggaaaaaagtacgatagaactaagcataatactggttttatgtgtttagataactatatggctaagaatggtcttagtctgaatcaaaataagtttgaaggcctttttactaaagaaaaaattgcaggggaagatgttattttacttgaaccacaaacttatatgaatgaatctgggcgctcaattagtcaagtagctaacttcttcaaaatagatccaagtgatattttaattatccaagatgacatggatatgccaattggtaaaattagaattcgtgccaacggcaaaagtggcggacacaatggaattaaatcaatcatccgtgatttggggactgaaaaatttaatcgtctaaaaataggcatccgccatcctgaaaacactactgttgtttcctgggttttgactccatttaataatgaacaacaaaaattaatggatacagcgttttctactagtgaagatattttagctgattttattagcggaaaagacgctggttatttgatgaataagtataactaataatgaaattaactgagattgtcgcccaagataaagaactgggcgcttttttgataaatacacaaaaaaataaaaaatcacttttaacaggtataaatgaacgtaacttaccacttattttacttgaactactaaagcaaaataatgtgcttataattattgaagaaaatgaaaataaggcgcaaagattagttgataatttagcgcctattttgcctgaagaaaaagttcaatattttgcagtggatagtactttagctactcaaagagccacagcttcgcctgatgaattagcccagagaattaaagcccttcacttgttattgagtggagatagtggcattgttgtgacaacggcacaagggctagaatatcaactaaatcctaaagatagttatataagaggcaacaaattaataaaagttgggcaagaatatgatttaaaagaactgaacaagtggcttgtagcaagcggttaccgtaaagaagccttagttgctaagcctggagagtttgcagttcgtggagatattttagatatttatccattagaccaagtctctcctattagaatagaattttttggtgatgaagttgataccattaaaagttttgatgtcaatacgcaaaaaagtattctagaaaaagaagaaattgttgttttaccagcttgtgaccgaatttttgaaactgataatctgaaaaaagcttataacttaatcaaggatgagattaaagaaagtccaaattctgagtctgctgaacaaaattttttagaggtacttgatgagttagctcaaggcaatttgccagacaattatgcttttttggttgattatttactaccaaaaagttgcagtctgctatcatacttgcctgaaaatgggttggtagtttttaatgattggcaagcaataaaaaaagcagatagcgaaataactgaccaaaacgctgattttattagtgatgaaatcaaagccggattaatgttaaatagtcaaaagttaagaatgaatttgactactgttttgcgtcagagtaaacatcatcgcttatacttgtcgttatttcaaaaaggaatggggcagttaaggtttgatagtttgtttaattggccaaacagagaaccggaacagttttttagtcaaatgcctctaattaagtccgagttaaataagtataaaaaacaaggctatacagtaattttacaagcagataatgagagaagaagtaagcaaattcaaagtaatttaatagattttgatttaaatttgccgattgttacaaaggaaaacttagttgaacacaaacttcaaatcacagtagggcaatttagtcagggcttttctttacctcaaattcaactagtctatttaacagagcgggaattatttaatacgcaagtccataagaagcgtaaaattctcaatttagaaaatgcgcaacgtttgcgcaattataatgatttaaagccaggcgactatgttgttcatgtaaatcatgggattggtcgctttgaaggaattaaaactttagatgttgatggtcaaaagcgtgactatataactattacttatcaaggccatgatcagttatttgtacctgctgatcagttatctctggttcaaaaatatgtaggatcagaaggcgatcgaccaaaggtcaataagttaggtggttctcaatgggcaaaaactaaacgctctgttcaaagcaaggttgaggatattgcggatgatttgattaaattatatgctgctagagaaagtgaaaaaggctttgccttttcaaaagataatgatttgcaaaaagcctttgaagatgcatttccttatgttgaaacaccagaccaattgcgatcaagtaatgaaataaaggcagatatggaaaagccaaaagctatggatcgattgctggttggagatgtcggctttggtaaaacagaagtagctattagggctgcatttaaagcaatccaagacaataagcaagtggcatttttagtgccaacaacaattttggctcagcaacattttgataatatttcagatcgatttaaagattttccggtgaacgttgctcttttatctcgtttccaaagtaatgcggaagttaaagaaattttggaaggcttaaaagtcggtaaaattgatttggtagttggaactcatagaattttatctaaagatgttgaatttaaagatttgggcttgttgataattgatgaggagcagcgttttggtgtaaagcataaagagcgtcttaaagaattgaaaaataatgtagatgtattaacattaacagctacgccaattcctagaacacttcatatgtctatggtaggtgttcgagatttatccgtaatggaaacgccacctgtcaatcgttatccaattcaaacttatgtaatggaacagttacctagtgttattcgagaagcctgtttgcgtgaaatggcgcgtgatgggcaaatcttttatttacataatcgaattggagatatagatgaaacggttgaacatttgcatcagcttgtaccagaagcaaaaattgaagcaattcatggccggatgagtgaaaatcaaatggcagatatcttatatcgctttttacataagcaatttgatattttggtgacgactacaattattgaaacgggaattgatatgccgaatgtcaatactttaattattgaagatgccgatcattatggattaagtcagctttatcaacttcgaggaagaattggaagaagtgctcgtttagcctatgcttatttcttatatcaaccaaataaagttttgactgaagttggagaaaagcggcttgaagcaattcgtgatttcactgagttaggaagtggcttcaaaattgctatgcgagatctttcgattcgcggagctggtaatatgctaggacagcagcaacatggcttcatagacagtgtgggttatgatttgtatgctcaaatgctcgatgatgcgattaaggctagaaaaggtggccataaattaataaagactaattctgaaattgatttaggaattgaagcttatattccagatagctatattagcgatcaacagcaaaaaattgagttttataagaaaattaaagttattagttctgaagaagaattaaatagtattgaagatgagcttttagaccgttttggcgattatccagttgctactgaaaatttattggctatagctaaaataaagtatttagctgatttagctggagttttagaaattcggtatatcaaagataagttaaaagtcgaattcaatttggaaagcagtaaacatttacaagggcctaatatttttaaagctttagagcatgttaatatgaaagcatcagtagccttaactgagcagcaacacctgacggttttattaactaaaggggttatgaaacgaagagttttattcaatgaattagaaacatttctaactgatgctggagaattggtagataaataaaaggagaaaaaatgagacttgataaatatttaaaagtttcacgtttagtgaaaagaagaactgtggcaaaggaaatggctgatcaaggtagaattgaagttaatggtcgtgttgttaaatcaagctacgatgttaaacttgatgatgtcattagtatcggatatggtagtcgattggtaaaagcgcgtgtgttgaatatccgtgaaactaccaaaaaagatgaggctagcgaattatacgaattggttgattaatgacttttattcgggttcttgttatacttagcgtagaatagtagttttgtggatagaggttaaaatatgcggggaccaagaatttctgacgcttctgataaagagttagctcggcttaggcaaaaaggtaaaaaagcaactgaagaagttcatcgtaagcgacgagtaagatatttaacagtctttggcttaattttcttaattttaggagttcagttgattcttaatattacaaccactcatcgaattaagtcagagattcaaaccaataaaacaagcttagtacaacaaaaagaaagaaatcggagattaaagattaagcgtaataacttaaaagatccagattacttggcaaaatacattcgttataaattctattactctaaaaaaggtgaaagaatttataacattccggaaaattcaaaggataatcaatgagatttgaagtaggacagcgaattataggaaagattaataatattaccgactatggtatatttgttagcttcaaaaataaaagtgggttaatatacaaagatgatttcaaggatggttgggaaagggagaagttaagattccagccaggccaagaaattaaagttgtaattactcaaataaaagataagaaaatcgctttatcacttaagcgagttaatgatcctgacttagttgatccaaataatcaatttaaagatttaagtaaggaagcttttgctagtactttaacggagttagctggacaggcaaaaaagacaattaaagatttacgggatggcttgaattaggccatcttttttataagatatggataaattaaagcagtttttgatagattataatctcgattttactaataaaacagttattgtagcttgtagtgctggaccagattctctggccctagttgatatgctaaaagattggccattaaagttgatagtagcccattttgatcatcaaatccgcgaggacagctatttagagactaagcttctgcagcaatattgtcagaaaaacaagttgatgttatgtgttgaaaagtggtcaaaacatgtaaataaaacagaagctgcagcaagagaagccagatacaattttttattagaattggctaaaagttggcatgcagattacttgttgacggctcatcatggggatgattatttagaaaacatccttttaaaattaattcggtcaggggatccagctgaaatgagttcgcttcaagcagttggacaaatggcgggagttaaactggctagaccacttctttactactctaaagctgaattaactaagtatttattagataagcatttggcatttattactgatgaaacgaatttaacaaatgagaacttaagaaatcgaataagacatcaggtagtacctttactaaaaaaagaaaatccggcgattttaaagaatggccgagtatttggacagaaaatgttagcttatcaaggagttgcacaaaaagctttttctgatttggaactagaaccagttgctggaagcttgcgaataaaaaagaaactattagctaactacactgatgcagaaaagaatttattttgggaaggaaaaatttggaaatattataatgaacgagttcatctagataattggcaaagtggaatttatcgggtccttgaataccaagactatttttatttatttaaagggcagcctaagtttgtagataaaagttcaataaaattagaccaaccttttacttttcatggaagaaaatatttaataacgactcagttaaatccgcaagccaaattagttggaacattttggtcaaagaaagcaggctttgaagtgggatcggccatttctggtagtaagttgcaattaaaaaatggacatcatgcgaaaagtaaaaagttttttgctcaagcagctattccaaatattcttaggccagctattctttgtctatatcaaaataaagcaattgtttttattgaaaatgtatacaaaaaccaaaaatgtgctaatgattttattaagtattacgttttcttggtaaattagtgccaagtaaagtaaaatattagagagagtctagtatttgtgttacacttgctaggtaattctagaatttcgtggaggtattcatgaaaaataagcggaatcggctttttactaatggccttttctatattgttattttcttgttgatgctttggggaataaactggatgattggtggcggtcaatctgcttcatcaagtgaaaatgttagttacagccagtttgtaaagaacttaaagaacgggaaaatcaaagactttagtattcagcctgcaaatggtgtttatagcatttctggttcttataaaaaggccaaagtgcaaaagaaaaagacaactagttatgattttctaactggtgcatcaaatagtgcaaagattaccaagttttcaacaactatgttgcaaaatgatccaacagttaaaactgtagaaaatcttgcacaaaaacatggtgctaagattactacacaaggagaatcacaatctggatcatggcttagtgcaattattacaattgtgccaactattttctttatggtcatgctttggatgatgatgaaccaatctgctggtggtagtcgcggcggtggtggtgttcttaactttggtaaatcaagagttaagccagaagatcctactaagaaccgtgtacgcttctctgatgtagctggtgaagaagaagaaaaacaagaattagttgaagttgttgaatttttgaaagacccatcacgttacttaaagttaggtgctagaattccatctggtgtcttgcttgaaggacctccgggtactggtaaaactttacttgcacgagcagtagcgggtgaagctggcgtaccattttattcaatatcaggttctgactttgttgaaatgttcgttggtgttggtgcttctcgtgttcgtgacttgtttgaaaatgctaagaaaacttcaccaagtattatctttatcgacgaaattgatgcaattggtcgtcgtcgtggtaatggtattggtggcggtaacgatgaacgtgaacaaaccttaaaccaacttttggttgaaatggatggtttccaaggtgatgaaggcgttattgttatggcagccactaaccgttcagatgtacttgatcctgctttaatgagaccaggtcgttttgaccgtaaagtattagttggtcgtcctgatgtgaagggccgtgaagctattttacgtgttcatgctaagaataagccacttgccagtgatgttgacttgaaggaagttgctcgtcaaacgcctggttttgttggggctgatcttgaaaatgttttaaacgaagctgctttggttgctgctagaagaaataaaactgaaattacagctgctgatattgatgaagcagaagatcgtgtaattgctggaccagctaagaaggatagaatgatttctgatgaagaaagaaagcgtgttgccttccacgaagctggtcactcaatctgtggtttggttttaagtgattcaagaactgttcgaaaggtcacaattgttcctcgtggccgcgcaggtggttacaacattatgcttcctaaagatgatcaatttattttgactaagaaacaattaatggaacaaattgttggtcttatgggtggtagagctggtgaagaagttgtaattggcgatcgttcaactggtgcttcaaacgactttgaacaagctactgctattgctcatagtatggtagtccactacggtatgacagacgaacttggcatggttcaacttgaaaaagaaggccaagcagagtatggtgttaagccatatagtgaagccacaactgctaagattgatgaagcagttaagaagatcttggacgaagcccataaacaagctattcaaatcgttgaagataatcgtgaaaagcataggttaattgctgaagctttacttaagtatgaaactttgaacgaaaagcaaattatggctttatataagaccggtgaaatgccagaggcagatcaagaagaatttccaagtgaatctaaggcttctacttatgaagaagctaaggctgcaatggaaaagaaggaacatcaaaaggattccaatgattcttcagataacaaagaagttgatgataaatcagaaaataaaactactgaagaaaattcatcagttgatgctaatgaagaaaagaagccagaaaagccaagcgataacgaaaacgaagacgaagactaataaatagggccggaaggctctatttttatggagaaaaccgatgaatgattatttaattaaggcaattgataaaactaagaatttacgcttgctagctgtcacaagtaaggatttagttagtgaagcgcaaaagcggcatgatacttggtcagcttcaagtgctgttttgggaagaactttaacaggcggtctgttactagcagctgctggtttggttgataaacaagaattgacggtccgcttaatggggaatgggccagtaggtgcatgtgtagtaacagctaagagtgactttactgtgaagggctatatatcaaatccacatatagcattaccaccaagaaacgatggtcatattgatgtgaaaaaagctgtgggtgaaggttggcttcaagtaaccaaagatcaaggcttgaatgagccttatactggtgaagtgccaattgttagtggagaaattgcggaagattttacttattatttagcaaaatctgaacaaattccttctgctgttggtttatctgtgtttgttcaggccaataatacgattggagcagcgggcggctttatgttgcaagctttaccaggtgcaagtgatgagcttttaagtacagttgagcagagaattaaggcattaccaaatatttccagtttatttttagagggtattacacctgaacaattggctaaaaagattttgggagaggattgcaaaatcttagaaacagatgacgtagcttatgcgtgtgattgctctaaagaaaagtttagtcatttgctagcaactttgaaaaaagctgatttacaagaaatgattaataaagatcatggtgcagaacttacttgccaattttgcaaagaaaaataccattttagcgaaaaagagttgaaagcaattctagctgaacaacttgaaaaataactttaatgattttgtaaaggcttgaaagttttaccttcaggtcttttttgttatgatattagagtaatttgaaaggaaagaagaaaagtgactaatacaaatagctggaaaattcgtgatatcacaattcccaaccgggtcgtagttgctcctatggctggtgtttccaactctgctttccgggttgtttgtaaagaatttggtgctggacttgtagtatgcgaaatgatttctgatcatggaatcatttatcgtaataaaaagactctagatatgcttcaagtagctccaaatgaacacccaatgagtatccaaatctttgggggaactgaagatactttgcttgaagctgcacaatatattgatcaaaatacagctgccgatattatcgatattaatatgggctgtcctgttcctaaggtaactaagactgatgctggatctaagtggctgcttgatgctaataagatttatcaaatggtccataaggttgttcaaaatgttgaaaagccagtcagtgttaagatgcgcctgggctgggatcgcaagcatatttttgcagtagaaaatgccttagctgctcaagaagcaggagctagcatgttggctatgcatgggcggactagaaaacaaatgtatcaaggtgaagcagactgggagaccttacatgaagtagctaatgccttaacaattccatttgttggtaatggggacattactagtccagaactagcaaagaaaatgattgatgaagttggagcaatagcggttatgattggccgagcagctttaggcaatccatgggaaattaaggacatggtgcattaccttgaaaccggggaaaagttgcgcccacaaacagttcgtgaaaaaatagaaactgctaagcatcaacttaatggtctggtagaattaaaaggtgaaaaggttgctgttccagaatttcgtcagcaagcagcttattatttgaagggaattccccgttcagccagaactcgtgctaaaataaatgaagtctggactcgtcaagaagtttatgacttacttgatggttttgtagaagaatatgaaaagcgcgaagctgctaaaaaggcacggcaagctatgaaagactaattgttatggaggatttataaattggcaaagaatgaactaaatgaccaattaatcgttcgtcgcgaaaaacttgaagaattacgcgaaagcggtcttgaaccatttggtagaaaatatgaaagaacagatttggctcgtactttagatgaaaagtacaagggcgaagataaagatgaattaaatgcagacatgccacaaaccaagattgctggtcgtatgatggctaagcgtggtaagggtaaggttggttttgctgatatttatgaccggactggcaagattcaaatttacgtacgtaaagatattgttggtgaagaaaattatcaaattttcaaaaagtctgacttaggtgacttcttgggaattgaaggtgaagttatgaagaccgatactggtgagcttactgttcgtgctcaccacgtaactttcttatcaaaggcacttcgtccacttcctgataagtaccacggtttacaaaacgttgaacaaatttaccgtcaacgttacttagacttgatgactaaccatgaatcatacatgcgttttgttcacagaactaagattattcaagccatcagagattatttgaataatagagacttcttggaagttgaaacaccagtacttcacaatattccaggtggtgcagaagctcgtccatttattacccaccacaatgctttggatattgatttataccttagaattgccttggaattaccacttaagcgtttgattgttggtggtatggaacgtgtttacgaaattggtcgtgtgttccgtaatgaaggtgttgacactcgtcacaaccctgaatttactgaacttgaaacttactgtgcttactgggacttccatgatgttatggacgaagcagaaggtattattaaggcagctgccaaagtagttactgatgatggcaaggtaaattaccaaggtactgaaatcgacttaggtaagccatttagacgtgttcacatggttgacttaatcaaggaacaaacaggtgttgacttctggaagccaatgacacttgatgaagctaagaaggttgctgaagaacacggcattcacgttgaaccattctggaaggtaggccacattatcaacgccttctttgaagaattcggtgaaaagtcaattgttaacccaaccttcgtatatggtcaccctgttgaaatctcaccacttgctaagaagaatgcagatgatcctagatttactgatcgttttgaaattttcattatgggtatggaatatggtaatgccttcagtgaattgaacgacccaattgatcaaagagaacgttttgaagctcaaatggcagaacgtgatgcaggtaacgatgaagccgatgttattgatgaagacttcgtacgtgcgcttgaatacggtatgccacctacaggtggtttgggaattggtattgaccgtttggtaatgcttttgactgatgcaccagctattcgtgatgtattgctcttcccaactatgcgtcctgaaagaattcatgacgaagaaaaagacattgatttagataaataaagataataaaaatgactagcattgagctagtcattttttgttaggtgagaattttcatcttttaaatttgtaagttttgtattccacaaactaagctgatgcttagtaattttcttattcttaaagccgttgataaaaatagtagctaagcgagaaagttcatcataatctaaatttctatctatattctttaagagctcgtcagttgcctgaaataaatcttcaactaactgggaagaaaagttcttttgtttaattgcttcacttaaggcatcacaacaatgcggaagtgcatctatccagccatattctggagtcgatgcagtaaagtcatgttctgtttttaaatatttgattaacaggttataaagctgcacttcttcttgagaagttaacaagcggtaataactagaatgtgaatcgttactagtgtgaattatcaaatagtataagagacaggtgaatgagcgagttagagtagctgagccagtttctccaaagcgataaaagagcaaattttgcttaattgcagtttcataacaaaatctagcttgctcaaaggcgaattcattattaaggaaggccttaccgaaaatggagcaaacaaggtcatcacgtatttcactatttggattaccaatattgttcattaaaaagttcagttcatctgttttatatgaagctttaggatgattgagcttttgcttgagggtggtcagagtgttcataataaattgttcttgtaaagttgcgtaaaacgcaattctagtaggatgaatattttgtacttggtattattttatcgaaaaacttaagaaatttgttgtatttgtgaaattaagtcttcaaattctaaggccgcgtcttttttattgattgatttacaaaagtgaacaatattttgtgccaacttaatgaattttggatttttagtttgttggtaattaagtaagtttttaacaatggaaagatataagcttgaatagtaatcaaattgatggatttcaagttgacagattttatgcaataatttttttgctaaatttggatttttaaagattagtgctacatttgcatttaataaagcaatgaaggcaaagatatgattttccattccgcaatctttaatatgcgggaaactattgattagttttacagcaattttgtaaagcagttcatcgggaagtagatgagtcacattgccaaaagtagtaatgtggtagtaattccaaagggatgttgaagttagaactttagtgattttttcttttaaactcattggaaaaatatctattttagtcttttggtaataaaaattgcatgtaagagcgcatagaaaaagctctgtattatcttggatatgattatatttctttagttgatttaatgctaacatgtgcagttcttcaatattgtttgctataaaagcatcttgtacttgaagtgacagatgatttacatatctttgaccgactaaatgagcgaattcattaggcaagacatgaatgttttcaagtaattgatctaatttatttaaaggtatgttactctcatcattttcccaatgcgataagcgtgagggggataattgttcaatgttgtggacagctgctttgagggtgatgttttgcgatacacgtaatttcttaaatgtttttccaatagagttattcaacaagggggtcctttcgtatgatttttaatttttttaggatatttatattctttcctgtattaccaactaaatactgaatgtatctaaaaaataaatagatttcaagaaaaatgaggagaaaaataatgaaattgcttaaaaagaataatgttacagctatgattgttgctatgggattagttactggattaacgggaactgctttagcaagtgcttcaggctattggactattactcaagagactgtaggtgcatatggtgcatggagctcatttggctctccaaatttaaaacagtctagcgataatgttgcttcatttaatggagatgcaatgccagcttggtggggttacaatgttcgattaattaatggtaatggtgcaagtcggtctaattggacaaggttaaaaaaggatcaaacgacatatagctacaataactcaggtctaaaaggttattactattatgctgatatcagatctcaaacatatgagccaaatgttacgactgtaaaagcacactttagtgcagatagaaaataatatagctcttgaaaaaaggattctagttagaatcttttttatattatagaaagggaaaatatgctttctaagagaacaaataaaataatagtcttggccttgctagcatatctaattttaattacttatactattttatctgctattaaagcagaaatgagacctggaattaccatagatgctgaaagctttatttatatgtttgaactggttcagccatttggggtctatgatggtttcttgttaacgggaactttattaattcttccaataattggttcatttgttccaatctttgtcaaaaataataatgaacttaataatgtggttcagcgaattgggtatggaaactttttgaaaaaatctgtttgtcagacatttattgttggactgggcttttcattcataagtcaaatctatgaaattattttgattaactggaattatgccccaatagcattttctaatgatagtttttatttagcgcaacgctttaatacattctccaataatagttttatacagttgcttacttatatagttacgtcttcaatcggttgggggattttttcggtatttatttttgcttgtggactttatattaagaaaaatccgctcttcatagtttcaggggcagtattaggtttaattttgcttcttttaccgactttatatggaatgatgaattatttcttgtatgctgtggctaatgtaactgagattagtactttaattgcaccaggaatgatcgattttgcaagtcaaaaagcaccaggtggaattatgattatctggataattagtgcgatattatatgctttaatagcgtggattttgatgatgacttggcagaaaaaacaattgcgaggtaaataatgccgacaaaaacaaacaaatatatcagatactctttaattggtgttttggcactaagtttttttgcatattggcttttgattgctggtatgaaaccgaagtatgacatcatatttgcagtaagttttcagcacggattatctatttatttgcaaaatctgctttatatattagtgtttttccaagtgttgattgctagaaaagtaagcaatgcaattgctgtaagaaagcaaacaaaaaaggttatttccaagttagctggcttaatagtggtggaatggttacttttttggatttcttttttaggaagttactatttatttaagagtcataatttctttaaaatgggagactttaaatttgggctgtggatacttcttgctcatatgttattaatgctctttttgatgttgagcttactattagcttatagactaccatttccttattttattattattttagtaatagctattacttggtcatatcacttatgttttgaatttacattaatccttccaaaatatagtaaaatattcgatcccctttatcgtgctacccactatatttatttaggaatttgtcatatctttttatagaaaggtcgaaaaatgttaaagattgataatatcagcaagcaatttggtaaaaaacaagtattaaaagatgtcagcttagaactaaatcctggagaaagaattcatattattggaaaaaatggctctggtaaatcaacgatttttaaaattataactaatattttgaaagctgatgctggccaagtagagttagctgaaaatgattatgttggggctttaattgaaaatccaggcttcttagaatatgaaagtggattagagaatttaaagtttttaggtaatttaaatcataattatgatgaacaagtagctatgaagttaatggaaaaatttgatttagatcctaatgaccttcaagctgtaagcaaatattcaattgggatgcgccaaaagttgggcattattcaagcagttatggaaaaccaaaatattgttttgcttgatgagcctactagaggaattgataaagagggtgtcgcaacatttgttaaactcttggatgagctgaaacaagaaaaaagcgctgtaattattgctagtcatgatgaaattccagggttgaagtatgacagagagttactattaaagaatggagaactagcaagtgtctaagagtgttaaagtatggagttatactcttattacaattcttattttaggattagcacgtgtttactttaaggaattagtgggttcacaattatggttggttaattttgcaataacaactaaaactcttaaattgttttccctaggagctgcactttacttttttgatgtggttatggctttaagtgcagttagtgaatttgaagagatagctacttttctctgggttagggagcttagtttaattagattatggcgagcttttgctagtcgttatattaaatattttggtagtttgttgttagttcacttgcctttaattagttggcaaaatatgagcttttctttgttaagtttattgggagaagctattgtctggggagtagcagtaagtatcggattttctaaaagtaatagtataagccaaaagatttcaattcctttattgtttggtgtattgagaattttgggaatgttaattgttagctgattttagtaaatgaaaaaggcaggaaaagtgatgaagttagcttcatatgatttctgcctttttcatttttttgtttgcatattacgcaattattctgcattgaggtgattgcgcaaaacttttttgttgttttaacgaaagcgcttaaatagtaaaatgaatatggataaatcggtactatatagctgatatattagtgcagatagaaaataatataactcttacaaaaatgattctaaatagaatctctttttatatttattgaaaggaaaaaaatatgttttctaagagaacgtgtaaaataatgctcttggctttgctagtatatctacttttaattacattcactaccttatctattatcaaatctgaaatgaagccaacagtaactgctgaagatttcatctatatgtttacgattgtacaaccatttggcttttttgatagtctttctacctacatgtctttattgattttccctgtgataggctcttttacatcaatttttgtgaaaaataataatgagctgagcaatattattcaaagaattggatacaataattttttgaaaaaagcagctttgcaagcttttttaatgggagtaactttctccgtgataagtgaaatttatcgaattattttaattaactggaactatgcgccaattacctttactgaaaagagtttttatttgtttcagtcgaaaaattctttttcaaataatagttttattcaattgcttttattcatggctactgctgctgtaggttggggaatcttttcagtatttatctttgcttgtgggctatatgttaaaaagaatgcaatctttttaatttctggcgagtttatcggattaattttgctgcttttgccaaccttatatgcgatgattaacccttttttacttgctgttgcaaatattgttgaaattccaacgctagttgctccaggattgattaatatgggaagtcagggagcaccaggcggaatcatgattacctgggtagcttgtgctttattatatgctttctcagcttggattttgatgactttatggaagaaaaaagcaattgcaaatgaactaaaaggaaaataaatcttgaagttagcacttttttgctagaaagaccttatcaaatctaactttttcattttatttgcttgttcactaacaagaagtgcagttaggaggtaactgatgcctgaaaaaaccgataaaattctcaaatacagtctgcttttaatgatggcgttaggttttttggcaagcttgtttttagctcccgactttacgtctaaaacggatgtgatttttccgacttgttattcacattttttgtctttatatgttcaaacaggtctttatgttttaacttactatgaggtcattacgattcgtcacttaagtaatgaaattgcggttcgctcacaaactaaacgaattattgtctttttaatgcgtttgattttttgccaatggttcttgttttggttatcatatttggctactttttacttgctaggtcatcgtatctttttcaaaatgggtaatccagtttttggcatgaatctcttattaggacatttaattcttgtcctgcttttagcatggtgcttgatattagcttataaagtgccttatccatacctagttatcatcatagtagtcattctcacgctaatttatcactattattttgaagtgaaaattttactaccgaagtacaatcctatctttgatcctatttatcgtgcacttcaccatatttacctgtaaaggagaaaactcatgttaagaattgaaaatgttaataaaaattttggtaaaaaagtaattcttaaagatatcaatttaactgttaaaccaggggagagagtccatattgttggtaaaaatggttgtggtaaatccactctgtttaaaattatcacaggtattttaaaggctcagggtcaggttaagttggatgaagaggattatctgggtgctatgattgaaaatccgggttttctagaatatgaaaccggcctagaaaatttgaaatttttggctaatttgaatcatcactatgatgaagcaaaagttcgcaatttaatgaaagaattttcgcttgatcctgatgaaagccaagcggtaagcaaatattcgattgggatgcgacaaaagctaggcattattcaagcaatcatggaaaatcaaaatattgttttatttgatgaaccaactcgaggaattgacaaagagggggttactacctttctaaagatgcttgatcgcttaaaagaacaaaaagtaagtgtcattattgcaactcatgaagatattgctggactgacttatgaccgagtattgaagttagaaaacggggctttagaaaatgtctagacaaaggaaattttggctttttagtttagttatttgcctaattttattttgggctagacaggtattgcccgagttaactaactctcagatgactttggttaattttgcttttagtagtcgaggaatgcgcttgatgcttttgagttgccttctttttacctatgatatttgtcccgttttaatggcaactaccgaagctgatgaattcaatacctttttatggactaggaagattggcgttagtaaagcttacatgatttttgccaaaagatttgctaattattttcttcctttcatcgtagcgcacttaatgctgcttaattcgttgcaattgctactgcaattacttaccttaccgatttggctattattgtgggtaattctgaccgctctagaatttgttaaaatagctagtccaattaaaaaagctagtattggattagtttttttagtagctaggatggggattttattaatttaaagatttagtggtaaaaataaatctatgatatctactaaaatctcaataaattaaaaaagtgcttgcaaaaaatttccgctatggtatattaataaatgtgctaagtgacatgcggaagtagttcagtggtagaacatcaccttgccatggtgggggtcgcgggttcgaatcccgtcttccgcttcacgagatgaggattcacagtagtgaatccttttttgttagcttcgggaaatagctcagcttggtagagcgctacgttcgggacgtagaggtcgcaggttcaaatccggttttcccgataattattcaaaaaagtctttgcagattgataaagctttgctataataaactctgttatgcggaagtagttcagtggtagaacatcaccttgccatggtgggggtcgcgggttcgaatcccgtcttccgctccacgagataaggattcacagtagtgaatcctttttattttactcaaaaagtatattaattatttttttagacttcctttgatataattatctaaacaaaggaggtctttttttgaaagaaaaacttaatttcggtaatctcgctttaaaaactttaatgtcaattgtaggggtaacaattttatcaattggagccacttttttacgtggtggtaatgttgggcttgatccatttactgcaattaacactggaatttccaataagctaggtttaggattagggattttccagttatcagttaattttgtaattttcttactgattttatggcttgaccgcaaaaaaattggaattggaacttttgttaatatgattatggtaggatttgaaattcaattctttactcaaatctataatcaactttttcctgagaagattactttcttagtaattgtggctgacacagttattggattacttttatttactttaggctcctctctttatatgggaccgaaattaggagttgctccttatgatgcaattgcgccaattttttctgaaagattcaaatcttcatataagataactagaattatccaagacgtattatttatggctggtgctttagcatttggtggcccagttggctttgcgacgattattgtagccttctttactgggccattgattacttggtggaatgaacatataagtgatccactagtagaatttattaatcacttaactcgtcctgatactagaaataaggttacagtacttttatcagcgatgggacgcagaacctatgaatcggtcgctaagacttatgaagcaactgaaattatgcaagcaagactaggacgctattctaattctgacttaaagactcagcaaaagattgcccgtcgtaatttagccaactctaagcagacttatgaaaactatcttgctcaatataagatgatcgaagaagaattaaataagagaaagaatcaataaatttaaacagaaaattttgtttattaagtaatttgatttacattagaattaagaaaaagtacaatattttagtcgatttttgaaaggcgggttaataatggaatattcttacagtagtagtgctaatcaagttttagcaattgcaaaagaacaagcacaaaattttcaacacagaatgattggtacagaacatgttttacttgccttggtaattgaatcaagtggggatgcagggaagattttacgacaatggaatattactagtggtgatattagacgcgaagttgagcgctatacgggatatggctctgcacctaaatcttcttatatggagatgtctcctcgtttaaatatgacacttaattatgctagaagagcagcacaagatgctggtgcaaaagaagttaaaactttgcatattctgttaggattagtttctacagagcaagtattagctgcgatgattttgaaaaacttaaatgttgatttggatcatttgcgccaagatattcttgatgatttatcagaaggtagcggagatttaagtcaagagagcaatgaattctttgatggtttaggtttaaaccaaaataaagggaaaggcaattctaagactccaactttagatagtgtttcaattaatctaaataagcaggcacgtgaaggcgaaattgatccagttattggccgtgatttagaaactaaaagagttatccagattttatcacgtcgtacaaaaaataatcctgttttagtcggggaaccaggagttggtaaaactgcagttgcacaagcaattgccacttgcattgtaaaaaagcaagttcctgaagacttgcttgataagcgagttatggccttagatattggtagtttggtagctggtactaaatatcggggcgaatttgaagatcgaatgaaaaagattttgaaagagattcgcactgatggaaaggttattttgtttgttgacgaaatgcataccttgattggtgctggtggtgcagaaggagcaattgatgcttcaaatattttaaagccatcgcttgcacgtggcgatattcaaatgattggtgcaacaacttttgatgaatatcaaaaatatattgaaaaagatcaggctcttgctagacgttttcaacaagtaagaattactgagccttcaaaagaagatactttgcatattttggagggcttaaagccaaaatatgaaggctttcaccatgttcaaattagtgaagctgctttaaaagcagcagtagatttatctactagatatttgagtaatcgctttttaccagataaggcaattgatttagtagatgaagcaagtgcaactgtaaaaattaataatgcagttggctcaaataaagagttacaggctcttgaaaatgaactcaagaaggttactaaacaaaaaagaatagaagttgaaaaacaaaactttgttcaagctgctaatttacaagcggatgaagacaagctagaaaaacaaaaacaagctttattaaataagttaaaagtgaatgcttatcgaaaagcagtggttaacgaagaagatattgctcgtgtcgtatctgagtggactggagtcccagctactcaaatgaagaaagatgatactaggaagttaattaatttagaagcaaccttacataagcgagtaattggacaaaacaaggctattcaggcagttgccaaggcaattaagcgtagtagaagtggtataaaggatgaaggtcgcccaataggttcattcttatttttagggcctactggtgttggaaaaactgagttagctaaggcagttgcttcagcagtgtttggcagtgaaaataatttagttcgaattgatatgtcagagtatatggatacaattgcttcaagcaagttgattggttcagctccaggctatgtgggatatgaagaaggcggacaattaagtgaacaagttcggcgtcatccatattccgtggttttattagatgaagttgaaaaggcccacccagatgtctttaatttattattgcaagtgttagatgatggctttttgacagattctaaggggagaaaagtggactttagaaatactgtaattatcatgacctctaatttaggttcacgttcattagttagtgataagactgtaggttttactacaagcgaagtgagccaagaaaaagaacgaatttctaaagtacaagcagcaactaaggacttctttagaccggaatttttgaaccgaattgatgcaactattgtcttcgaccaattacaaaagaatgatttacgaaagattgtcactcttttaacccaaaagttggttgatcgattggctaaaaagcaaattgttgttaagttttcaccagcagcactcgatgtcattgctaaggctggttttgatcctgaaaatggtgcgcgtcctttaagacgagcaatccaaaacttagtagaagataagttatcagatatgctcattagttcagagctagtttctgggcaaactctaaaaataggcgctgccaaggggcaattaaaatttactgtttctgaaactaaaaaagcagctttaagcaagtaaagtcaaggttttgctattgacaaaaacagcgattttttgatacaataattctgattttcaaaaaggctgatattcagtagcttactgatctattgtccagtaagctgataagaacaaaaacgacaaaacgtgttgtttttgtttttttatgctcaaaaataccagttttttaatttgtaacacaaatgtaatatttggtttcttttgcaaaagaaaggatgttttccttggacggacatttagtgaattacggtcaacaccggacaagacgtagtttttctcacattaaagaagtagttaaattacctaatttgactgatgtacaaaccgaatcatataagtggtttttaaatgaaggtattagcgaagtatttgaagatattatgcctattaatgacttctcaggtaagttatctttagactttgttggttacaagcttcaagatgctaagagtactattgatgaggctcgtaatcatgatgcaaattatgctgctccacttcgtgttactttaaaacttactaaccacgaaactggcgaaattaagacacaagatgtattctttggtgacttaccattaatgactagatcaggttcatttgttattaatggtgcagaaagagttattgtttctcagcttgttagatcacctggtgtttactataactgtgatgttgataagaatgcacgccaaatctttggcgctactgttatccctaaccgtggtgcatggcttgaatatgaaactgatgctaagaatatttcttatgtacgtatcgaccgtactagaaaattacctatttcagttttaattagagcacttggttttggctcagacagtgaaattcaagatatttacggaacaaatgatattttgcaattcactttagaaaaggatgtacacaataatcctgctgatagtcgagttgctgaagctttgaaagaaatttatgaacgacttcgtccaggtgaacctaagacgactgattcatctcgttcactcttgtttgctcgtttctttgactcacgtcggtatgatttggctccagttggtcgttacaagattaacaagaagctttctttaaagagtcgcttacttaatcaaactttagcagaaactttagcggacccagatactggtgaaattattgccaagaagggaactatcgttactcatgctgtaatggaaactcttgaaaagtatcttgatcgtgatgactttaagatggttacatacactccatctgatgaaggtgtaatgcaagatccaattactgttcaagaaattaaggtcttttcaaaagttaaccctgaaagagaagttaagttaatttcaaatggtcatattaatgctgatgtaaaatgcattactccagcagatattttggcttctattaactatttcttcgctttacaagatgaaattggttctactgatgacattgaccacttgggtaacagacgtattcgtcgtgttggtgaattattacaaaatcaatttagaattggtttagcacggatggaacgtgttgtacgtgaaagaatgtcaattcaagatcctgatacagttactccacaacaattaattaacattcgtccaattgtggctagtgtcaaggaattctttggttcatcacaactttcacagtttatggatcaaaacaacccattgggtgaattgactcacaagagaagaatgtctgccttagggcctggtggtttgtcaagagatcgtgctggttatgaagttcgtgacgtgcactatactcactatggtcgtttatgtccaattgaaactccagaaggtcctaacattgggttgattaactcaatggcaacatacgcaattattaataagtatggtttcattgaaactccatatcgtcgtgtttcttgggaaactcataaagttactgataagattgactacttaactgcagatgtagaagataactacattattgccggtgccaacacaccacttaatgaagatggttcatttaaagaaaatcttatcttggctcgtcacaaagatgataatgtcgaagttacaccagataagattgactacatggacgttattcctaagcaagtagtttctgtaacttctgcatgtattcctttccttgaaaatgacgactctaaccgtgctttgatgggggctaaccaccaaagacaagctgttcctttaattaatccacatgctgctttggttggtactggtatggaataccgtgctgctcatgactcaggagacgctttagttgctgaagcagctggtgtagttgaatatgttgatgctgatcaaattagaattcgccgtgaagatggtactttagacaaatatgaacttgaaaaataccgtcgctcaaatgcaaacaagaactacaatcaaactcctaacgttaagaagggtgaaaagattgttgaaggcgaagtaattgctaatggtccatcaatggctgaaggtgaattagccttaggtcaaaacccattaatcgcattcatgacttggaacatgtacaactatgaagatgccatcatgattagtgaaagaatggttaaggatgatgtatatacttctatccacattgaagattacgaatcagaagcgcgtgacactaaattaggacctgaagaaattactcgtgaaattcctaatgttggtgaagatgcacttaaagatttagacgaacaaggtatcgttagaatcggtgctgaagttaaagacggcgatattttagttggtaaggtaactccaaagggtgttactgaattatcagctgaagaaagattacttcacgccatctttggtgaaaaggctcgtgaagttcgtgacacttcacttcgtgtaccacatggtggtggcggtatcgttcaaaacgttgaagtctttactcgtgaaggtggagatgaactttcaccaggtgttaacaccatggttagagtttacatttgccaaaagagaaagattcaagttggggacaagatggctggtcgtcacggtaacaagggtactattgctgttgttgttccagaagaagatatgccattcttaccagatggtcgtccagtagatatctgcttgaacccaatgggtgtgccatcacgtatgaatattggacaggttcttgaattacaccttggtatggctgctcgccaattaggtattcacgttgctactcctgtatttgacggggctgatgaagatgaagtttacaataccttacgtgaagctggtatgagtaaagacggtaagactgttatttatgatggtcgtaccggtgaaccattccacaaccgtgtttctgttggtattatgaactacttgaaacttgctcacatggttgatgacaagattcacgcacgttcaatcggaccttactcacttgttactcaacaaccacttggtggtaaagcacaattcggtggacagagatttggtgaaatggaagtttgggctcttgaagcttacggtgctgcttacactttacaagaaatcttgacttacaagtcagatgacgttgttggccgtgtaaaggcatacgaagcaattgttaagggtgaaagaattcctaagccaggtgtacctgaatcattccgtgttttagtgaaggaattacaatcattaggtcttgatatccgtgttcttgatatggatcacaaagaaattgaacttcgtgacatggatgaagactcaagtgaacatcttaatatcgacactctttcacgtttagcagaagaacaagaaaagaagaagttggccgaagaagctactaaatctgaagaaacaacttctgaacaaagtgcaacaagttctgtagatcaagcttctgatgatacagtttctaagtaggaggttaaactttgattgacgtaaacaaatttgaaagtatgcaaattggccttgcttcacctaataagattagatcatggtcttatggtgaagttaaaaagccagaaaccatcaattaccgtactttgaaaccagaaaaagatgggttatttgatgaaagaatttttggtccatcaaaggactgggcttgtgcttgtggtaaatacaagggtattcgttaccgtggtattgtttgtgatcgttgtggtgttgaagtaacttcttcaaaagttagaagagaacgcatgggtcacattgaacttgctgctcctgtaacacatatttggtattttaaaggcattccatcaagaatgggattagttctagatgtatcacctcgtgcacttgaagaagttatttactttgctgcatacatagttattgatgcaggagatacagatttagagcctaaatcactattaactgaagcagaataccgtgaaaagaaggctaaatttggtaaccgttttgttgctaaaatgggtgctgaagcaattaaagaattacttcaaaatgttgatcttgataaggaagttaagagcttaaaagcagaattacaaactgctactggtcaaaagagaacaagagcaattcgtcgtttggacatcttaaatgcctttaaagattcaggcaacaagcctgaatggatggtaatggatactgttccagttattccaccagacttacgtccaatggttcaacttgaaggtggccgttttgcaacttctgaccttaacgatttgtaccgtcgtgtaattaacagaaataaccgtttgaagcgtttgcttgatttacatgcaccaaatattatcgtgcaaaatgaaaagagaatgcttcaagaagcggttgatgctttaattaataacggtcgccgtggtcgtcctgttgttggtcctggtaaccgtccacttaagtcactttcacacatgcttaaaggtaagcaaggtcgtttccgtcaaaacttgcttggtaagcgtgttgactactcaggtcgttcagttattgacgtttcaccaaaattgaagttctatcaatgtggtgttccccgtccaatggctcttgaattattcaagccatttgtaatgcatgaacttgttaagcgtggcgtagcaactaatattagaaatgctaagcgcaagattgaccgtgaagatgatgatatttgggacattcttgaatatgtaattaaggaacgtccagttcttttgaaccgtgcacctactttgcaccgtttaggtattcaagcttttgaaccagttttagtacctggtaagtcaattagacttcacccacttgcttgtgaagcctacaacgccgacttcgacggggaccagatggccatccacgtgccactttcagatgaagctgttgctgaatcaagacttttgatgcttgcagctcaccacattttggctcctaaggatggtaagccaatcgtaacacctggacaggatatcgttttaggtaattactggttaacgcaggcagaacgtggccgtgaaggtgaaggtatgatcttcaattcaccagcagaagcaactatggcttatgcgaatggtgacattcacttccacactagaattggtttagctgctgattcaatgcctgaaaagacttggccaaagggttacgaacatggtgtgtttgtaactacttacggtaagatgatctttaaccaaatcttccctaaggactttttctatgtaaatgatccaactcaagaaaacttaactcatccattagatgtgaagtatttcttacaaccaggtgaagacatccatgaaaaattagataacatggatttgggtactccatttaagaagggcttcttgtcagatgcaattgcagctgtttacaaggaatacagagtgcaaagaacttctgacttcttagatgacatgaaagaacttggatatactgcatgtaccacctcaggtttaactattggtatggcagatattcctatggttagcgataaagatgacatcgttgccaaggctcacaagaaagtcgatgttgtttctaagcaatttagacgtggtttaattactgaacaagaacgtcacgaccgtgtaatcagcatttggaatgcatgtaaggatgaagttcaaagtgaagtagcaggaatcttcgatcctcgtaatccaatttcagtcatggccgattcaggtgcccgtggtaacatttcaaactttactcagcttgctggtatgcgtggtttgatggccgctcctaacggtgggatgatggaaatccctgttacttcaaacttccgtgaaggtttgactgttttggaaatgttcatgtcaactcacggtgctcgtaaagggatgactgataccgccttgaagactgccaactcaggttaccttactcgtcgtttggttgatgtggctcaagacgttattattcgtgaagctgattgtggtaccgaccgtggtattactgttcacgctattaaggaaggcgacgaaatgattgaaccattattcgatcgtttggttggccgttacactgcaagaagcgtctttgatccagaaacacatgaagtcattgcacctaagggcataatgatggatgaagagttggctcaagaaattgttgaccgtggtgttaaggaagtaacaattcgttccgtatttacttgcaacacccaacacggtgtttgtcaaaaatgttatggtatgaacctagctactggtgaagaagttgaagttggtgaagcagtaggtactgtagctgctcaatcaattggtgaacctggtactcagcttacaatgcgtaacttccacaacggtggggttgcaggtgctgaagatattactcaaggtcttcctcgtgttcaagaattgtttgaagcacgtaatcctaaggggcgtgctactatctcagaagtaactggtgttgtagcttcaattgaagaaaatccggcagaacatactcgtgaaattactgttgaaggtaagactgatacaagaacgtactctgtcccttacactgctagtgttgcagttgcggaaggtgatgaagtggttcgtggtgacaagttaacacttggttctattgaccctaaggaattgatcagagttagagatgctttgactactgaaaagtacatcctaagcgaaatccaaaaagcctacagaatgcaaggggtagaaattgccgacaagcacgtcgaagtaatggcacgtcaaatgcttcaaaaggttcgggtacttgatccaggtgaaactgacatcttgccaggtgaattgatggatatcggtgaatttaaggacagaaacaaggaagttatcatttctggtggtattccagcaactgctcaaagtgtaatcttaggtattactaaagccgctcttgaaactaacagtttcttgtctgctgcttcattccaagaaactacacgtgttcttactgatgcctcaatcagaagcaagaatgacccacttcttggtcttaaagaaaacgttattattggtaaaattattcctgcaggtactggtatgccagtttaccgttcaatggaacctcaagctgatgtacctaagctacaagcagtatattcaatcgctgatattgaacgtcaattagctgaagaaaacaaaattgacttaaatagtttgaataagaataaataatttaagttaattcataaacaaaaaagaatcattaagcaaataatgcttaatggttctttttatacagtcatgaattagattagtaattttaaaaagctcaaactaaaaaataaaaatggtataaatggcagagataaatgtgtttgtttttgtgcttttaatttaggatagagagttagaactgccagcgaggcgaaaagaaaaacgagattagcaaaatattcagaataaaagaatgaaattattagataaaagaataaatcagccaatccgagcttttttagtagaactaaaattcctaatgtactactcatgatgaagattgaaaaaaatgatattgccgttattgctactttttcaaaaagtagcactttaataattactattagaaatgaaaatataaaaattgagaaggatatttcttggtagtaataatcgaagattgacatcattaataaaagtaaacaaaggaaaaattcaattaagccactttttgaataccaatctgttttgaaaaaggcaataccaccaattaattcaataaaaatcaaaaaagatgggattttgtttttacaatgtctgcaactgcctttttggagtaaaaacgaaaaaataggtaataattcataccaacttaaagtttgtttgcaggacaagcaataactacgacgccactttaggccgtctttttgaacgattactgaaataaatgaagctatacaagctcctaaataaaaattaattatatgtaataccatattttcacctcgcaataattaaatacacaaaaaagataagaatttttttgaaagagaaaaattttttgacttgctttattttgaaaaggtagtacaatagcaattgtgtattttttaaatcatttccgtgaggttaaaaaagaaactcccggatgtgtgaacaaattttaggaggaaaaattaatgccaaccattaaccaattggttagaaaaggccgtcactcaaagacgactaaatctaaatcaccagctttaaactacggatacaacagcatgaagaaggaacaagtatttaatcctgctcctcaaatgcgtggtgttgcaactcgtgtaggtactatgacacctaagaagcctaactcagctttacgtaagtacgctcgtgtgcgtttatctaacttaactgaagttactgcttacattccaggtgaaggccacaacttacaagaacactcagttgttttaattcgtggtggtcgtgtaaaggaccttcctggggttcgttaccacattgttcgtggtgcccttgatactgctggtgttgacggcagaaagcaaggtcgttctaagtacggtgcaaagaaaggttaaggaggagttaaataatgcctagaaaaggacatgtagctaagagaactgttttagcagacccaatttacaactcaaaactcgttaccaagttaatcaaccacttgatgattgatggtaagaaagcaaaggcttcttcaatcctttacgatgctttctcaattattaaggacaagactggtaaggaaccacttgaagtttttgaagaagcaatgaacaacgttatgcctgttcttgaagttagagctcgtcgtatcggtggttcaaactaccaaatccctgtagaagttcgtcctgaaagaagaactactttaggtttaagatggttagtatcttacgcacgtttacgtaacgaacacactatggatgaacgtttagcaaacgaaattatcgatgcttcaaataacactggttcagctgttaagaagcgtgaagacgttcaccgtatggcagaagcgaaccgtgcatttgcacactaccgcttctaatttgttgtcgttagtatttaaggagaaaaatatatcatggctaaacgcgaatttcctttagaaaagacacgtaacattggtatcatggcccacatcgatgcgggtaagactaccactactgaacgtatcctttactacactggtaagatccacaagattggtgaaacccacgaaggtgatagccaaatggactggatggaagaagaaaaggaacgtggtattactattacctctgcagctactactgcacaatggaaagattaccgcgttaacattatcgataccccaggacacgttgactttactatcgaagtagaacgttcacttcgtgttttagatggtgccgtaacagttcttgacgcacaatctggtgttgaacctcaaactgaaaatgtttggcgtcaagctgaaacatacggtgttcctcgtattgtttttgttaacaagatggataaaatcggtgcaaactttgacttctcagttaagactttgcacgaacgtttaaacgcaaacgcacacgcagttcaaatgccaatcggtgctgaagatcaattcgaaggtgttatcgacttaatcaacatggttgccgatgtttacgatgaagataagcttggttctaagtgggatactgttccagttcctgatgaatacaaggcagaagctgaaaagcgtcgtggcgaattaatcgaagcagttgctgatgttgatgatgacatcatggaaaaatacctcggcggtgaagaaatcactaacgaagaattgaaggctgctatccgtaaggctactttggaccttaagttcttccctgtatttgctggttcagcattcaagaacaagggtgttcaaatgatgcttgatggtgttgttgactacttaccatcaccacttgatgttaaaccttatgttgctcacgatcctaagactgatgaagaagttgaacttcttgctgatgacaacaagccatttgctgctttagcatttaagattgctactgatccatttgttggtcgtttaactttcatccgtgtttacactggttcacttcaatcaggttcatacgtattaaacgcttcaaagaactcacgtgaacgtgttggtcgtttgcttcaaatgcacgctaactcacgtactgaaattagcgaagtattctcaggtgatattgcaggtgctatcggtttgaagaacactactactggtgactcattaactgatcctgatcacccacttattcttgaaagtcttgaagttccagacccagttatccaagtttctattgaacctaagtcaaaggctgaccgtgataagcttgatgttgctcttcaaaagcttactgaagaagacccaactttcaaggctgaaactaatgccgaaactggtcaaactttgattgctggtatgggtgaacttcacttggatatcatggttgaacgtatgaagcgtgaattccacgttgaagcaactattggtgaaccacaagttgcttaccgtgaaaccttcaccaagccaactaaggcacaaggtaagttcgttcgtcaatctggtggtaagggtcaatacggtgacgtatggatcgaatttactccaactaaggaaggcgaaggctacgaatttgaagacgctattgtcggtggtgtagttcctcgtgaattcattccttcagttgacgctggtttgcaagaagctatgaagaacggtgttcttgctggctacccattaattgacgttaaagctaagctttacgatggtagttaccacgaagtcgactcaagtgaagctgccttcaaggttgctgcttctcttgcattgaagaatgctgctcctaaggccggagctgtaattcttgaacctatcatgaaagttcaagtaattacccctgaagaatacttaggtgacgtaatgggttcaatcactgctcgtcgtggtaacatggacggtatggaagatcgttcaggtgctaaggtattgaatgctatggttccactttcagaaatgtttggttacgcaactactttgcgttcatcaactcaaggtcgtggtactttcactatggtatttgaccactactcaccaacacctaagtcaattcaagaagaaattatcaagaagcgtggcggaaacgcagaataatttaatatgattctataaaaagggacattacaaaaagtaatgttccttttttgtttccaatgctaggaagcgctttcacaaagagaaacaaagttctataattgttttgaggagatagtttattaatataaagattggggtgaatatggtgagcaaaagaagaaaacatagatttccaaccgcatataccgtaattattattgttttattattggttgagattttgaccaattttattccatcaggtaattatgcaactttagcatataattcagatagcaataattttgtaattactgagccaaatggaagtaccaagaaggaatctgcaacgcagaagactttagataactataaagttaatatcgaaattagtaagtttaaagatggcactatttataagcctgttgcaatccctaattcatatgaaagaattaagtctaaaaagccaaatttattacaggcagtaattaatttctttactgcacaagtaaaaggaattggtgacagtatagatattataacttttgttctaattcttggaggctgcattggaatagttaatactaatggtgcaattaactctggtatcgcagccttgtcaaaaaagattaaaggtaagcaggcgttgcttattatagttgtgatggctttaatttctattggcgggacaacatatgggttggctgaagagactatggctatgtatccaattttgataccggtctttttaatggctggttatgacacaatgacagttattgggacaatttttttagccgatagtattggaacaatgatttcaacaattaatccattttcaactattattgcgtcaaatgcagcaggtgttaatttttcacatgctttaccattgagaattataatgtgggcaatttgtacaattatcggcatgatttatgttgttgtgtacgctgaaaaagttcgaaagcatccggaagcatcatatgtttatgatcaatatgaaagtgatcgtaaaaagtttttgactgatagtagttttaaagagactaagtttacatggcaacaaaagctgaccctttcaatttttgcaatcgcttttattatcatgatctggggagtacaatctcaaggatggtatttcacagaaatctctgtaatctttctagctgcaggctatttaatggccctcttttctggtatggatgaacataaagtagttggtgcttttgtaaatggggcaggtgatttactcggtgtagctctaacaatcgggattgcccgtggagtttcaattattatggaaaatagtcatacgagcgatactattatgaacttttttagtaaacaaatttctggactaccgccattgatttttatttggctattattcttggtatatattgttttaggcttcttcattcagtcgtcttcaggtttagccgttttatcaatgcctattatggcgccacttgcaaatgtagttggaattgatcgctcaagtgtgattgatgcatataatttaggccaaggatttatttcgctgattgcaccaaccggattaattttaatgggactgatgatggttggaattgattttaataaatggttcaaatggtgttggaagttattagtgattgaatttattctttgccttgtatttttaggtcttggtctactagtttactaaaattaaaatgcaaatttcgtaattgaaatttgcatttttttaactctaaaaaagttatgaaaaaaaggcaaaaaagttttgcaaaagccttgataaataagctgatagcaggtatactagtttttgtgcattttaagggaaagtatgctcttgtgcacatttttgttgtagctttgacgcaaaaggttgcggcacaccaggctgcattgccacagtggcgtgccggtaatttttgcagagctagtcatcttttaaagaagacgcaaggaggtaatttgatggcaagtcaacaaatccgtattagacttaagtcttacgaacacggtattctcgatgaatctgctgctaagatcgtcgcaacagcaaagagaactggtgcagaaatttcaggtccagttcctcttccaactgaaagaactttattcactgttcttcgttcaccacacaagaacaaggactcacgtgaacagttcgaaatgcgtacacacaagcgtttaattgatattttgaatccaacaccaaagactgttgattcattaatgaaattagacttacctagcggtgtagacatcgaaatcaaactttaatttttatagatttatggaggtgtaatcatgaccaaaggaatcttaggaagaaaagtcggtatgactcaaatcttcactgataaaggtgtccttgttcccgtaactgttatcgaagcaacacctaacgttgttatgcaagttaagactgttgaatcagacggttacgaagcagttcaattaggttaccaagacaagcgtgaagtattgagcaacaaaccggaaaaaggtcatgctgataaagcaaagacttcacctaagcgcttcattcgagaaattcgcggtgttgagcttaaggattacgaagtcggctcagaagttactgtggatacatttaaggaaggtgacgtagtagacgttactggtactacaagaggtcacggttaccaaggtaacattaagcgtcacggtcaatctagaggacctgaaacacacggttcaagataccacagaatccctggttcaatgggttcaatcattaaccgtgtaccaaagggtaagaagttaccaggtcacatgggtgtgaagactgttactattcaaaacttagtaattgaaaaagtcgtagctgacaagaacgttcttttagttaagggtaacgttcctggtgctaaagactcattaatcgttgtaaaatctgctactaaagctgacaagtaggaaggaggactagaatggctaatttaaaacttatcgatcaaactggtaaagatgctggtgaagttactttaaatgacaacgtttttggtattgaaccaaacgaaaacgtagttttcgatgctgttattagacaaagagctggtatgcgtcaaggtactcacgcaactaagaatagatctgctgttcgtggtggtggtaagaagccttggagacaaaagggtactggtcgtgctcgtcaaggttctatcagagctcctcaatggcgcggtggtggtactgtatttggtcctacaccacgttcatacgcatacagcttgccacgtaaggttcgtcgcttagctattaagtcagttctttcacaaaagttgcaagacaataacttaatcgtattagaccaattaagtttagatgcaccaaagacgaaagaattcaaggctgttttaggtaacttgaatgttgacagcaaagttttagttgtttctgacaatgaaaacgttcaactttcagcaagaaacttggaaaacgttaaggttgttccagttaatggcttaaatgttgttgatgcagttaactatgacaagcttatcttgactcaagacgctgttaagagaattgaggaggtgttggcataatgaatgcacatgacatcattttaagacctgtcattactgaaaagtctactaacttaatggacaacaagaagtacacttttgatgtgcttttaactgctaccaagactcaagttcgtaacgcagttgaagaaatttttgatgttaaggttaagagcgttaacattatgaacgttcgcggtaaggacaagagagttggtcgttacactggtaagacagctcgtcgtagaaaagcaatcgttactttaactaacgattcaaatgatattaagatcttcgctgacgaagacaataaataataggaggttagtcaattggcgattagaaagtacaagccaaccactaatggtcgacgcaatatgacctcttcagactttgcagaaattaccaagaaaaagcctgaacggactttacttgaatcacaatcacatactgctggtcgtaactcatatggtcatattactgtaagacaccgtggtggtggtcacaagcaaaaataccgtatcatcgatttcaagcgtaacaaagatgatgtaaaagcagttgttaaggcaatcgaatacgatccaaacagaactgcaaatattgctttacttcactacactgatggtatcaaggcttacatcttggcacctaaaggtcttaaagttggcgacatcgttgaatctggcgtagaagctgatatcaagccaggtaatgcacttccacttgcaaacattcctactggtatttcaattcacaatatcgaattaaagcctggtaagggtggtcaattagtaagaagtgctggtactgaaggtcaagttcttggtactgatggtcgttacactttagtaagattacaaagtggtgaagttcgtcgtatcctttcaacttgccgtgcaactatcggtgtagttggtaatgaacaacactcattgattcaactaggtaaggccggccgcaagcgttggttgggcaagcgtcctcaatcacgtggttctgttatgaaccctaacgatcacccacatggtggtggtgaaggtaaagcaccagttggtcgtccacaacctatgaccccttggggtaagaagtctcgtggtattaagactagaaataccaagaaggctagtgaaaagatgattattcgtcaccgtaagggcaacaaataattagaaggagggtattaattaatgagccgtagtattaaaaaaggtccatttgctgatgaacacttattaaagaaggtcgcagcacaagaaaacgccgaaaagaagcaagttatcaagacttggtctcgtcgttcaactattttcccttcttttgttggtttgacaatagctgtttacgatggtagaaagcatgttcctgtgtacgttaccgaagacatggttggtcacaagttgggtgaatttgttccaactagaactttccgtggtcacaaggctgacgacaaggctactaaatagttaagaggaaggagaaaatctaaatggcagaacaaatcacttcagcaagagctgaagcaagaaccgttcgtatcgctcctagaaaagcacgtttggttattgatttaatccgtggtaagagcgttgcagaagcattggcaattttgcaatttacgccaagagctgcttccccaatcgttgaaaaagttttacgttcagcaatcgctaacgcagaacacaattacgatcttgaaagtgcaaacctctacgtttctgaagcctatgtcaatgaaggtgcaacccttaagagattccgccctcgtgctaaaggtatggcttctccaatcaacaagagaaccagtcacgtagttgttgtagtttctgaaatgaacgattaagggaggtatatcgatgggtcaaaagattaacccacttggtttccgtctcggtgttaaccgtgactgggaagcaaaatggtttgctgacaaagactacaaggaaactttaaatgaagacttacgcatcagagatttcgttgctaagaaattaaaagatgcctcagtttcaactgtagaaatcgaacgtgcagcaaacagaatcaacatttctatccacactgctaagccaggtatggtaattggtaaaggtggttcagaagttgaagcattaagaaagcaattaaatgcattaactgaaaagcaagttcacatcaacattgtggaaattaagaagcctgatcttgatgcagaacttgttggtgatagtgttgctcgtcaattggaagctcgtattgctttcagacgtgctactcgtcaagctactcaaagagctatgcgtgcaggtgctaagggtatcaaggttcaaactgcaggtcgtttgaatggtgctgacatggcaagaagagaatggcatactgaaggtagtgtacctcttcatactttgagagcagatattgattacgcatgggtacaagctttaactacttatggtcaaattggtgttaaggtttggattaaccgtggtgaaatcttacctggtcgtaagaacagaccagcttctaagcgttcgaagggaggcaacaagtaatgccattagtaccaaagcgtgtaaaacaccgtcgtgaattccgtggtaaaatgcgtggtgctgccaagggtggaaagaccattgcatttggcgaatacggtttgatggctcttgaatctcactggatcactaacagacaaatcgaagcagctcgtgttgcgatgactcgttacatgaagcgtggcggtaaagtttggatcagaatcttcccacacaagtcatacactgctaaaggtgtaggtgtacgtatgggttctggtaaaggtgcaccagcaggttgggtagctgtagtaaaaagagaaaagattatgtttgaaattggtggcgtttcagaagaagttgcgcgtgaagctttaagacttgcttctactaagttgccaatcaagtgtaagtttgttgcaaagagtacggaagtaggtggcgaatctaatgaaggctaaagatatcagatcattaaccactgatcaaatgttagaaaaggaaaagcaatacaaagaagaactttttaacttgcgtttccaacaagcaacgggtcaattagagaacactgcccgcttgagacaagtccgtaaaaatatcgccagaattaaaactgttctgagcgaagaagcgttaaagcaaaactaattaatggaagggagtcattaacttgagcgaaacaatcgaaagaaatcgtcgtcacgtttaccaaggccgtgtggtttcagacaagatggacaagactattactgttgttgttgatacttacaagaaccacccagtttacaagaagcgtattaaatactcaaagaagtactacgctcacgacgtaaataatgatgctaaagttggcgatactgtacgtatcatggaaacccgtccattgtcacgtcaaaagcgctaccgtttagttaaaattgttaagagacgcgtttagtttgcggatttaagtgaggggaggattacatagtgattcaaaacgaaagccgcttaaaagttgctgacaactccggtgccagagaactattagttatccgtgttatgggtggctcaaagcgtaagaccggtaatattggtgatatcgttgtttgtgctgttaagcaagcaacaccaggtggcgttgtcaaaaagggcgacgttgttaaggctgttatcgtaagaacaaaatcaggtgcacgtcgcgaagatggttcatacatcaagtttgacgaaaatgctgctgtcgtaattaatgccgacaagagccctcgtggaactcgtatttttgggcctgtagcccgtgaactacgtgagcacgacttcatgaagatcgtctctcttgctcctgaagtattataaaatttttagggaggtgcactgatgtttgttaaaacaggtgacaaagtaaaggttatcgccggtaaagaaaagggcaaagaaggtactgtaatcagagtagaccgtaagaacgaccgtgttgttgttaaaggtcttaacatgattaagaagcacgaaaagccatcacaaaccaaccaaaatggtggtgttgttgaaaaagaaggttcaattcacgtttcaaacgttatgcttattgatcctgaatcaggcaagccaacaagaattggtcacgaaatcgttgatggtaagaaagttcgtatcgctaaagttagcggtaaggcaatcgataagaaatagagaggaggatcctaatggcaaatcatttagctgtacaatacaaagaagaagttgcatcagcattagctgaaaaatttggttacaagtcaaccatgcaaatcccaaagattgaaaagatcgtattgaacatgggtgttggtgatgcagtatcaaatgctaagaatttagatgaagctgttgaagaattaactttaatttcaggtcaaaagcctttaattactaaagcaaagaagtcaatcgctaacttccgtttacgtgaaggtatgtctatcggtgctaaggtaactcttagaggtgatagaatgtacgacttcttagataagttgatcaatgtttctcttccacgtgttcgtgacttccgtggtgtttcaactcgttcatttgatggacgtggtaactacactttgggtattaaagaacaattgatcttcccagaaatcgactttgataaagttaaccgtactcgtggattagatgtagtaattgttactactgcacaaactgacgaagaagcacgtgaacttttgcaacaatttggattcccatttgcaaaataaattggaggacatcaatggctaaaacatcattaaaagttagaaatcatcgtcctgctaagttctcaagtcgtgcatacacacgctgcgaaagatgtggtcgtccacattctgtatatcgtaaattcggtttatgccgtatttgtttaaaggacttagctcacaaaggtcaaattcctggtcttaaaaaggctagttggtaataaagagtaaggaggaaagcataatggtcatgactgatccgattgctgattacttaactagaatcagaaatgctaacatggcaaagcacgattcagttgaaattccagcatctacgattaaaaagtcactttcagaaatcttgaagcaagaaggtttcatccgtgattacgaagtaactgatgacaacaaacaaggtatgatcaagattttcttgaagtacggtccaaatggtgaacgcgttatctctggtttaaagagaatttctaagccaggtttgagaaactacgttggtgccgaaaacttacctaaggtattaaacggtcttggtatcgccattgtctcaacttctgctggtgttattaccgataaagaagctagagaaaagaatgttggtggcgaagttcttgcctacgtttggtaattctgacagaaaggagaacaactaatgagccgtattggttttaaagttattaatgttcctgacagtgtcactgttaccaaggaaggtaatgtcatcactgttaaaggaccaaaaggtgaattaagtagagaatttagtccaaaaatcacctttgaacaaaaagacggagaaattactgtttctcgttcaagtgaaaatgataaagctcttcacggtacatcaagagcaaaccttgcatctatgattgaaggtgttgttgatggttacaagaagaacttgaaacttatcggtgttggttaccgtgcacaagctcaaggaaacaagcttgtattgaacgttgggtactcacacccagttgaattcgaaactcctgaaggcattactgttaagactccttcagcagttgatattgaaattgaaggtatttctaagcaagttgttggtcaatttgcagctgaagtacgtgcagttcgtccaccagaaccttacaagggcaagggtattcgttacgttgatgaatacgttcgtcgtaaggaaggtaagacaggtaagtaatagaaatttttgaggtgaaattgtgatttctaaaccagataaaaataaattgcgcttaaagcgtcacaagcgtattcgtggcaagatttctggtactgctgagcgcccacgcttgagtattttccgttctaacaaaaacatctacgctcaaattattgatgacgtagcgggtgtaacgctagcaagtgcctcaactttagataagtcagtttctgcagagggaactaagcttgaacaagctcaagcagttggtaaagcaattgcggaagctgcaaagaagaacaacattactactgttgttttcgatagaagtggttacttataccacggccgtattcaagcattagcagatgcagctcgtgaaaacggattagaattctaggaaaggagatttaactgatggcaaaccgcaacgattctcgtaaagatcgcagacctaaagacgaaattgaagatcaattagttgctgtaaatagaatcaccaaggttgttaagggtggtcgtagaatgagatttgcagcacttgttgttgtcggcgacaagaagggccacgttggctttggtactggtaaagctcaagaagttccagaagcaatccgcaaagctgttgaagcaggtaagaagaatatgatttctgtaccaactgttggtactactattcctcacgaagttatcggtcacttcggttcaggtaacattttacttaagcctgctgaagctggttccggtgttgcagctggtggtgccgtacgtattgttatggatatggctggtattgctgatattacttcaaagtcacttggctctaacactccaatcaacgttgtaagagcaactatcgatggcttgaagaagcttaagactcgtgaagatgtattaaagcttcgtgaatcagcaaagagcttacaagattaggagagactagatgactgatttaaagattactttaattagaagtgctgcccaccgtctacctaaccaacgtaaagttgttaaggctcttggtcttggtagaattaatagctcagttgtccttccagacaacgcagctactcgtggtgcattaatgaaaatcgcccacttaatttctgttgaagaagttaacaagtaagatttaaggaggtgccgaataaatgaagcttcatgaattaaaacctgcagaaggttcacgtcgttcaagaaagcgtgttggccgtggtacttctagtggttatggtaaaacctctggtcgtggacaaaagggtcaattggcacgtcaaggtggacatactcgtccaggttttgaaggtggtcaaatgccattgttcagaactatgcctaagcgtggtttcaagaacattaaccgtaaggaatatgctgtaattaacttggatgatttaaacaagtttgaaaatggtagcgaagtaactatcgctgaccttaaggcaaaaggcttggtaaagaaagaattatcaggtgttaagttacttgctaacggtgaattaaaagttaaggttactgttaaggtaaacaaagcttctaaggctgctgaagaagcagttaatgccgctggtggatcagttgaggtgatttaatgttctcgaccttgaagaacgcctttaaggataaggaaattagaaataaaattttctttacgctctttattcttttgttgtatcggatcggtgctaatatcgctgtccccggtgtcaacgcaaaagcgattaaccaagttgcacaaactggattagttcctatgcttgatacggtaagtggtggtggattggataattattcaattttttcattaggtgtttcgccttatatcactgctcaaatcgtgattcaacttcttcaaatggatattgttccaaaattagttgaatggggaaaacaaggtgaagttggtcgtcggaagacgaatcaggtaactagatacttaaccttagttgttgcttttatccaaagtattggtattacactaggctttaatgtgttaacacaaatgggtcttgtgaaaagccaaaccccacaaacttatattcaaattgcgattatcatgacagctgggacatttttattaacttggcttggtgatgaaattactgataaagggctaggtaatggggtatctgtaattatttttgcaggtatcatttcccgattgccaaatggtattgcgcaaatcttcaaagaagatgtttcaaatgcaagtagtagtgatcgctggaaaggcatattgttcttcgttgcaattattattgcaattttagtaattacgaaagtagttacttgggttgaacaagctattcgtcgtgtacctattcagtacacaagacgggcagctgtcagtggttctgaaagtttcttaccactaaaagttaacgtatctggagttattcctgttatctttgctagttcctttattatcactccttcaaccattttaatggcctttcaaagtcaccaaggtgaacaatggtatcaaatcttaacacaaatctttagtcttcaaacaacacctggagcagttatttatacattgttaattgtgcttttcactttcttctatgcttttgttcaggtaaatcctgaaaagctctcagagaatttgcaaaagcaaagtgcttatattccaagtgtttggcctggaaaagatactcaagattttgtttctaaattattaatgagactctcaacagtaggatctgtttatctggggcttgttgctcttttaccacagcttgcaactaatatctggggtctaccaagttcaattggtcttggtggtactagtctcttaattgtgattggtgttgtacttgagctttcaagacaagtaaatggacttctaatgaagagagaatatgtaggatttataagataggtgaagttagataatgattaacttaattcttttaggattgccaggtgctggtaagggtacagtttctgaacgtatcgttgataaatataaattagctcacatctccacaggagatatgtttagagaagctatggctaatgaaacgcctgtaggtctcgaagcaaagagctatattgataaaggaaatcttgttcctgatgaggtaactgctaagcttgttgaagaaagattagcaaagcctgacactaataatggctttattttagatggatttccaagaactacagcgcaagcagaaatgcttgaagatattactaagcgacttaacaagcctttaactaatgttattgcacttgatgttgaagaaagtgtattagttgatagattgtcagcacgtttcatgtgtaaagcatgtggagctacatacaataagttctctaagaaaccaaaagttgaaggtacttgtgatcgctgtggtggacatgaattctatcaaagagaagatgacaagccagaagtggttagaaatcgtcttcaagttaatgaaaaaatgaatgcgccacttcgtgatttttaccaacaaaagggtttgctctctgtagtaaatggtgagcaatccccagagaaggtattcgaagatactgacgcaattcttggtaaagattaagtaaagtttatttatttaatttcccgtgatataatttcaaagtatgacaatttgattccggaggaaaaactttggcaaaagatgatgtcattgaagtagaaggtaaggtagtagataccttacctaatgctatgtttaaggtagaactagaaaatggtgccactattttggcccatgtttctggtaaaattagaatgcattatattcgtattttacctggagataaagttactgtggaattatccccatatgatttaactaagggtaggattacgtatcgttttatcaagtaataacggaggtaaacatgaaagttagaccatctgttaagccaatgtgcgaacattgcaaagtaattaagagaaatggtcgtgttatggttatttgccctgcaaatccaaagcacaagcaacgtcaaggttaatatttaaaaattaggaggtgcaatttatggcacgtattgctggtgttgacttacctagagaaaaaagaatcgtagtcgcattaacatatatttacggtattggtgaaccaactgctaagaagatttgtgcagatgctggtgtttctgaagacattcgttctaaggatttaactccagaagatcaagaaaagcttcgtgctgaagttgataaataccgtgttgaaggtgatttacgtcgtgaaattagtatgaacattaagcgtcttgttgatattggttcatacagaggtgttcgtcaccgtcgtggccttcctgttcgtggtcaaaacacaaagaacaacgcacgtactcgtaaaggttctaagagaagccgttaataaaaactaagtaaagaggaggtttattaatgcctgcaaagaaaaacacgcgtaagcgtcgtgtgaagaagcacgttgaatctggtgtagctcacattcattcaacttttaacaacactttagttatgattactgatgttcaaggtaacgctgttgcatggtcatctgctggtgctttgggctttaagggtagccgtaagtctactccatttgctgctcaaatggctgcagaagctgctgcaaaagcttcaatggatcaaggtatgaaacatgtcgaagtatcagtaaaaggtcctggtgccggtcgtgaagctgcaattcgttcacttcaagcaactggtcttgaaattactgcaattcgtgatgttacacctgtaccacacaatggttccagaccaccaaaacgtcgtcgtgtctaattctgtccatagtttaggacattacgttttgaaaggggcccagtaatgattgaatttgaaaaaccaaatattaccgttgttgaccaagaggatgcatacggtaagtttgttgtcgaaccattagaacgtggatttggtactactttaggtaattcattgcgtagagtattgcttacctcaattccaggtacggcactttcttacatccaaattgatggcgttttgcatgaattctcaacagttcctggtgtacgagaagatgttaccaagattgttcttaatctgaagaagcttgaacttaagtctatagcagatgaagaaaagattgttgagcttgatgttgaaggcccagctactgtcactgctggtgatttgaaggttgactctgaagtcacagttttgaatcctgatcaatatatttgtactgttgctgaaggtggacacttacacatgcaaattgcggttaaaaacggccgtggttatgtacctgcaagtgaaaataaaactgatgacatgcctatcggggttattcctgtagattcacttttttcaccaattaaaaaggtaaactaccaagtagaaagtacccgtgttggtaagaaagatgactacgataaacttacgctagaagtttggaccgacggttcaatcacacctagtgacgctcttagttttgcttctaaaattttgattgagcactttaaagtatttaaattctcagatgctcaaaccgattttggtggcgaagtaatggttgaaaaagaagacgataagaaagaacgtcaacttgaaatgacaattgaagagttagacctttctgttcgttcatacaactgcttaaagcgtgcaggtatcaacactcttcaagaattaactgataagagtgaatctgatatgatgcgcgtaagaaacttaggacgtaaatcattagaagaagttaaaaataaacttgcagatcttggactttctcttcgtcatgaagattaagtttactgcatataaggaggcaaactcatggcatatcgtaaattaggtcgcgacagtgctcatagaaaagcaatgcttcgtgaaatgacaactcaattgatcattaacgaacgtatcgtgactactgaagcacgtgctaaagaaatccgtaaaactgctgaaagaatgattactttaggtaagcgcggtgatcttagtgcaagaagacaagctgctgcatttgtacgtaatgaaatcgctgacgttaagcaagaaaacgatgcagttgttgtaaagtcagctttacaaaaattatttagcgatattgcacctcgttacaaggatcgtaatggtggttacactcgtattatgaaacttgctaccgctcgtcgtggtgacggtgcacctatggttattttagaattagtttaattccaaaccaaaacttaatagctattaagaattatccatggaagtgagaataagcgttaagatgatggcttttgcttagtctagcttagatgtagatcatccctctccatggatgatttttttatcctttgctgttacaattaagaaagttaaatgaggatgatggtatgaacaagataattgaaataaagaatttaacttttaagtatcctaatacagaaagcctaattttggataatctttctttttctgtaaaagaaaattcctggaccactttaattggccacaatggaagtggtaagtctacaattgcccgcttgttaattggattactagctgcagaaatggataaaaaagatccttattttataaaaatagatggtatggagctaaatgaaaaaaatatttggaaaataagagataagatagggattgtttttcagaatccagataaccaatttgttggaagtactgtagaggacgacgttgcatttggacttgaaaataaaggtatttcaagaggaaaaatgttagctttagttaacgaagccctcaatcaagttggaatggcagagtttaaagaatctgaaccagcacaattatctggtggacaaaagcaacgggttgcaattgcggggattttagcagtaaaaccgaaaatcattattttggatgaagctacatcaatgcttgatccagaaggaaaaaagagcatccttaatttaatcaagaaaataaagcagcaatataatttaacagttatatcaattacacacgatttagaagaagttgaaaaatcagatgaagttttagtgcttgatagcgggaagatagttctacaggataatccagatgctatttttaatcatgcagaattactccaaaaaataggattaggtcttccttttggttatcaacttgcagataaacttagaaaaaagggctttttaatttctaagaatgccaatactcaagaaaagttggtgaaagagatatgtcaattaaatttgaaaaagtagattatatttattcgcctaaaacaccattcgaaaaaaaggctctgaataatataagttttgagttgaaagagcatagctttgttgcaataattggacatactggtagcggtaaatcaactttaatgcagcattttaatgcgttattgaagccaagtgctggtcaaattaagatagcaggctttactttgaatgcacaaactagtaataaaaatttaaagagattacgagaaaaggtaagtttagtatttcaatttcctgaagcacaattatttgaaagtactgtactaaaagacattgaatatggtcctaaaaattttggctattcagaagtagaagcgaatgaattagcaaaaaaatggctaaaaaaagttggtttaccttcttcagtaggagatagatcaccatttgatctgtcaggtggccaaatgagacgcgttgcaatagctggagttatggcgtatgagcctgatattttgtgtcttgatgagccggcagctggtcttgatccccagggcaagagagaaatgtttgctctgtttaagcaatatcaaaaagaaggacatactgtaattttagttacgcataatatggatgacgttgcggaatatgcagatgatgttttagttttagaaaaaggcaaattgcttaagcatgctactcctgaagatattttttctgatgcacagtggctttctgagcatcatctagctatgccaactgctaatctatttgctgaaaaattagttgaaaatgatttaagtattgacgttaatcctttaaccattgataaattggcaaatgaaatcgaagaaaaattagtaaaggaaaataatgagtaaaataataattgggcgttttattccaggtgattccgtagttcacaagatggattcacgtggtaaattgatttttacatttctctttatctttatcatttttttagccaataactggcaaagttatttagttttgctattagctagtttattagcaattgttgctacaaagataagtttaaaattcttttgggatggaattaagcctttattggggttaatcttttttacatcacttttgcagttgttttttacaagtggtggagaagtcttttggaaatggggaattttttcaattactagctctggtttaattaattccatatatatttttttgaggtttacattaattattttgatgtcaacggtaatgacgttaactacagctccgttagctattgccgatgcgatggaatggttgcttaagcctttaaaatatttacatgtaccggttgcggaaattgcactaattatgtcaattgccttacgttttgtgcctactttgtttgatcaaacgataaaaattatgaatgcacaacgctcaagaggtgctgattttaatgatggtggtctaataaaaagaataaaagctgtagtacctttgttggttcccttatttattaattcattagaagtagccatagatttatcaactgcgatggaagctagaggttatcggggtagtgaaggaagaagcaaatatcgagtgttggagtggtcaaaatatgatcttattaatttaggctattttgtgttactgataattttattattaagctttaggagtaaataatgccacgatttaagatgacaatggcctatgatgggcatttatttcacggatttcaaaagcagccaaatcagcggactgttcaaggtactattgaagaagcattaaaaaaaatgtctaaaggtaagcgcatagttgtacatggctcagggagaactgatgcgggtgtccatgcattgggacaagtgattcattttgattttccaaatgataatattcccgctaataaaatggttttggcccttaattctatgatgccaactgatatagtttttaaggaagcatcaattgttgatgaaagttttcatgttcaatattcaactaaaggtaaatggtatcgctatattgtaaatcaagatcgatttgtagatccctttaaacgattttatactggccattatccttacaagttagatgtttcaaaaatgcaagaagcagcatctgatttgttaggggaacatgattttacaagttttgcagctagtggtggacaaattattgataaagtaagaacgatattctatgtaaaaatttggcaaaagcctgaagaaaatgagatcgtctttgattttattggaaatggatttttatataacatggtgagaattatggttggagccctcttagaaattggaaatggaagacggccaatccatgatttagagcgtgtaattcttgctaaagatcgccaagaagtgcgtaataccgcccctgcaagtggcctttatttatatcatgtgttttatgaagaagttccagaaaaatatcgcttagataagaaaaataattgacattacgactaattgaaagtatcatagactacgtatgtttgtccacgataggccccggaaacttattgtttgtcaaactgcaaaaaaacggaggaatttaaattgcgtactacaccattagcaaaaactagtgaaattgaacgtaagtggtatgttatcgatgcaactgatatcgcattaggtcgtttatcaactgttgtagccactattttaagaggtaagaataagcctcaatacacacctaacgttgatactggtgataatgttatcatcatcaacgcagctaagttaaagttgactggtaagaaggctactgataagatttactaccaccactcagatttccgcggtggtttaaaagctgtttcagctggcgaattgttagctaagaaccctgtaagattagttgaattatcagttaagggtatgcttccaaagaacactcttggtcaccaagaattcttgaagatgcatgtatatgcaggtgctgaacacaagcacgaagctcaaaagcctgaagtattagaaatcaacaaataatctaggaggttagacaatggcacaacaagctgcatacgctggaactggtcgccgcaagaattctgttgcgcgcgttcgtttagtaccaggtaacggtaaaattactgttaacaagaaagatgttactgattacattcctttcccaaacttggttcaagatttaaagcaaccattagcattaactgaaactgaaggtcaatacgacgtagttgttaatgttaacggtggtggtttctcaggtcaagctggtgcaatccgtcatggtattgcacgtgctcttcttgaagttgacccagatttccgtggtcctttgaagaaggcaggtctcttgactcgtgacccaagaatgaaggaaagaaagaagccaggtttgaagaaagccagaaaagcttcacaattctcaaagcgttaatcttattatcaagattactgctaccaaaagcatcccgtatgggatgcttttttgttggccaatttcgtctcctgtcagcgagttttcttgtatactaggttaatttggctctttgtcaaatcctgttgataaagagtgatttaaagaatcaagcaatatataaattgcttggttctttttctttaactttgttttcttctaatctaattcttgttagtaagttaatgtaatttgagtaaccataagcagtacgctcaatctgtttaatcttacgattgaaaccttctaaacaaccattagagtagctgaatctagcaccatttaagactgctcgtaagttatgcttaaaggtcaataaagtcttgtgcatcaaagtgccaacctcagctttagaattaattatttctttcaaagaattagtatctctagctttaagagcagccataaagtcttgcattaaattatacgcattatctagccttggatcacaactaataccttccattacaacttgttcttgagttagatagtctttgaagtgccaattataatgagggtgaatcttatctaaatcaacgaaagacttaagataaagcttccaaggtgatttgagcagttgatattgccttgctcgtttatcaaaagacttcatgactaaaactcttaaagaattaaaagagcgagttaacatctgtaccatatgaaaacgatcaatgataatttctgcattagggaaacaagctctaacaatattttgatagtaaaagtttaagtccatagaaacagttttgacgttagcacgagcactaggagagaatttaccaaagtatttaagtaaagactttttgtatcggtttctgaggatttgaaccacttcatgcttttgaccatcaagacaaataaagtgtagctttttatcgacgcctttaaattcatcaaaggctaagtgttcaggtaaatagttatagttatcaataaaacgatgagaacaagaagctaaaacgcgttaaacagtattaacagatagattattctcacgagcaatactagtcatagaacggtcctcagttaaagcagaaagaacctttcttttggcaggattagagatagaacaatatttattaactaacttagatttggccattgaacgagtattacaatctcggcagagaactctttgcttatttaacctgataatcacaggactactagcattagaagtaataaatctaatattagtctgaagatgaccattatgaatcagattaacagaaccgcaaaaaggacaagcaggctgaataagagtagcttgaaagaccttatacttaatatcgttaattaatttaaagaaatgagcattaaaagtgatattagggtcttggatatcgagcgaaaatttaatacaatcattgtaagaggacatagaaaaacctttaatctattaaactattaaaatttgagtcgtgttgaattttattgtaagtagaggggctatggcctctttttttgcaataaaaaacctgttaacagtttaactcaaataaactatcaacaggaaaaattatagaaccgttaatttataatatgttggtcaaattctacgtaaagagctttttaagaggctattaagttagctaataaaataatataaaaaaggtccgtgagattaattctcacggaccttttttatatatcttctttagttaatttcttaagtcttaatactaaggctaatgagcaaaaaccaaagattgcagaaataaatacgatatttccaatgttaaacaatcctgttccgattgcaattgaggaaacaaatgaaccaactgcgatacccaaatttgaaaatactgggttaaatgttgatgataaatcaagagctcctgggaactcatcatttgctaagtcaaggaagagcacggtcacattagcaccataactaacgttaacgatgcagacaaccgcaatcaagataaaggcaataattccaaatgctagtgggaagttgtgtggattagttaaattgattaataagccaattaagaccaatgacactggcataataacatataaaaatggaatatcttgcatattacctcggtcagcgtaatagcctccgagtttgttaccaaagattgatacaataccaagaataaataaaagaatacttaatactgagtctgtaaaatgaagatattttgtaataatctcagtgatataagtatagtaactatattgagcaccagtaacgcagataatgaataaggcattagttacagtaatgggatgaacaatatattttttacgatcactagaaattttagcagcttcttcaggggtattagcttgactttgtggagtatcttttggtgcataaataaatagcaaggcaaagataataatagtcaatatggtaaccatccagaagctatcgcgccatgaaaatacttgagcaatagtattaccaataggcacgccggcaacattagcaatactaaacccggcaaagacccaagaaattaatccggcttttttttctggtggagcaataaaactagccattacgacggtaatcgaaataatcgaaccagcagttgcaccagctaaaattctggataaaagtagttgaatgaaattgggagcaaaagctgtccaagtatttgctactaagaaaattgttaataatccaaataaaacattgtgtcgtttaaaacgggcacttaataatgaaatgaatggggtacagaatgaataaaccaatgcaaataaggtaaccaggatacctaaagttgcaagaggtgttcccatatcactatggatatctttcaataccccaacaatcatatattcgttacagccaagcataaaagccactaaaacgaacaagattgattgaatcttatatttcaatgtactatctcctttattgtattgttgaaaacaacatatactagtttaccgagaaatagtaattaaatcaaagttatctaaaaaagtacaaacaaaaaaagtggataaaatccacttttttagctaaatatgtttttgctttaattgtagaacagttgtgattaatgataaggcagcaaaaactgcagatacaaaaacaacatgtcctaatgtcaaatatggaatagcaagagatgatgccaaagaaccaatggcaattcccacatttgaaaatacaggtgttaatgatgatgctaagtctaatgcatcaggataatggttattggcaatatcaagcagatatacagtaacacttgaaccaaatgaattacttacaataaccattaatgctaccaaaacaaatgccagaattttaatatgcatagttaatccaacaataattaaagcaggtgtcatgaaaagatacaaataaggcatattcttcatattaccatgatctgcgaaaaatccacctaacttagtaccgataattgcgacaacccctaaaatgaaaagtaatgttgatacggaagctggactaaatttcatatatttagtaagcaatttagtaatgtaggtatagtaactaaattgagctgcacatgcaaaaacaataaatgcgcaagttaaaataactctgatatctttaataaagtcttgcttatcagtgttatgaatagattcagtgttcttgctggtatttttagcagtaatttgtggtgtgtttctaggtgctaaagaaattaaaagcagtaaaacaattacactaagaatagtaataattgcaaaactataccgccatgaaaagatttcggcaattttattaccaacaggaacaccaagtaagtttgcaataccggcaccagaatatacccaagaaatcaaaccagctcttttttcagctggtgcaataaagttggtcataattattgtgatagaaataattgatccagcagttgcaccagataaaattctggaaatgatgagcacgtaaaagttaggtgcaagagcagttagtgtgttagcaataataaacacaactaagagtccaaataacactagatggcgtttaacgtgtgcaaaaacaatagatataataggcgtacatatagaataaacgaaagcaaagacagtaaccaaaatacctaaaagggaaatttgaatttttaagtctgcgctgatattttctaaaaccgccactaccatgtattcgttacaaccgagcatgaaagctactaaaacgaacatgattgactgtaatttatatttcaatgttctatctcctttgaattgcatagcaaagtatactcattaagtttacccgcttgaacattgaaaataaagaaaaatatttaaaaaaggaaaccattttcaggtttcctttttctagttattcatattttcttaaattaagttcatatgctacacgttctggatcaactggttcattgtctacctcaatcattccacgataaacaaaaccatttttttcagcaattctttgaacgattttattaacaggagcagtatcaatgcgataattttcaattcctttaactctcattgccgaaattaaattgctcatcataagtccagataagttttgcccacggtatttactgctgattgctaagcggtggattgttgcataagggtcattattattttcccaagaaccatggctaatttctgcataagtaggttcttcaccgataataatagctgcatagccagctgtttgaccatctacttttaaaatccaagcatcttcgttggtaatatcttgtttaataaccgcttcatcagggtagccgttttgccattgattacttccggagtcttttaaaaactttttggatgaattaattatttccataatgtcggctaaatccgataattttgctggttcgataaatactaaactcaaaataatacctcctaatgaaaagtgttattactatctaaacatatttattgctagaatcctaataatatgcaaaaaagcaaccctatatggccgctttttaacgaataagatatttgattgtcatagcaagaataaaggcaataaaggcaaaaattgctgaaataaagacaatttgagcaatagaaataaagttgattgcttgagcagctactaatgatccaactgcaattcccacgttagaaaaaacgggattaagggatgaagctaaatccaaggcttgtgggtatgagtgacttgcgatatctaatagaaatacagtaacacttgaaccatatgagcagttaacgatacatataagtgcaattaaaataaaggcaaaaattcgtaattgcatggtaaagcctgttacaactaaagcaatcgccatgaataaatataaccaaggaatatctttcatattgccccgtccagcgatatagccaccaattttatttccgataatagaaacaaaacctaaaataaaaagtaatggtgacaaaagctcagttttaaatcccattgattctgtaagtatcttggtgatataggtatagtaactaaattgagctgcacaaacgaaaacaataaagagacaagttaagatggtacgtttatctttaatgaaagctgctccaccttggtgggattttttactggtgtcatttttgatatttagttgtggggtatcacgtggagcatagacaattaaagctgcaaagataaagattgttaaaatagtaaccatccaaaaactatttcgccaggaacctagttcagcgattttattacctattggaactccagcaacattggcaatactaaaaccagcaaatacccaggaaattaaactagctcgtttagcaggaggggcaataaaactggccataataatcgttattgaaataattgctcctgcagttgatccagatagaattctagaaagtaagattgaaatgaagttgggtgcaagtgcagtccaggtattagctaataaaaaaattgttaaaagtataaataaaacattatgccgtttaaaacgattgcaaacaattgaaataatcggtgtgcagattgagtaaaccatggcaaacaaggttactaaaagacctagtaatgataatggaatttttaagtcttgatatatactaggtaaaactccaacaatcatgtattcgttgcaaccaagcataaaggcaactagtacaaataaaattgcttgaattcgatatctcataacaactattcctctctatagtattaggcttaagaaaagatattattatcattctaatgatggaaaaaataaatgtaaatatgatggaaaaaataaatgtaaatataaaaagctggcaaagccagctttttatactaaatattttcttttaagtagttgtaaagcatgcctttttcaagttcagcagtttcaacacctaaagcattagcaagagcgtatgaaaaggcccaagcagtggctggaccacggctagtgataactttttgcttttgatcagtaacgacaatatcttcatgaaatcttccagttgggcaatcaatagaaatttcatcttcaaaaccaggataacaagtgaaatcggtatctgctaaaagaccatattttcctaaggccattggtgcagcacacatcgctgcaatccacttgccagcttgatgacgcttttgcattatttcagctaacttttgacttgctgccaagttcttggctccagctagtccgccagggaaggagactaaatcataatcaagtaaactatcatcaacaaccttgtcacaagtcaatttaatcttgtgatcacctaagacttctttgctagttaagccaaccatatcagcttgcaagcctaagcgacgcaaaacatcaacttgacttaagccttcaacttcttcacaaccatctgcaaaaattacggcaacttttttcataacttaatcctttctttgataaaattatttataagtctattctacgcaattttatattgaaaagttaagtaaggatttgaaaagaggaagtttatggtaggggaaattttagtttcgatttttttaataggagctggtattttagcaggaatagtttcagtggtatcaagtatggcttcacttgtatcttatccggccttactacttgctggggtggcgccagtttatgctaatgttactaatacagcggccttaatttttacaggattaggttcagcagtttcttctatgaaagaattaaaaagttcatggcacaaatatattaaatacattattttaatttcaattggtgctgcaattggtagttttttggttgtaatatttcccaggaaaatttttgaaaagttggtaccattttttgtctttctttctgcttttttatttctaatgagcggtaaaaagagtacatatcaaagaaaggcaaataatcaatttttggcaaagatcgaaatgtttgcggcaggtgtctatactggatatttcggtgcagcagcagggatattaatgctgattgctttacttagcgtcagtaatgatgactttgttgttgttaatgctgtgaaaaatgtaataggctctttgggaaatctgattgctttaataatctttcttttcacttcaaaagtatactggattaaggcaattcctctggcaattgggctatttattgggggatttttggggcaaatgattattaagtacttaccagtcaaggctgtaagaattataacttttatttttgctatctttttagcggtatatttgggctggcaagcttaccgttagaattttttgaaaaaaactttctcgaatttgatggtagaatggaattagtaaaaaggaggatataaatgacgactgaagtatatttaatcagacacggtgaaacaatgttcaatcagctgaataaggttcaaggttgggctgattccctcttgacgataaaaggtattaatgacttgaaaaagacagctgaagcgttgtcacagattcattttgataatatgtattcttctgacttaaaaagagcaatagatactgttcatttaatgaaaaatgctaatgaagttttcgaaataggaaaaattaaaaaattgccagaatttagagaagtcttttttggctcatttgaaggggatgacattgatcaaacctgggaatgtatcagccaaaaagcaggactgggtaaagaaagagatgttcaaaaaattattaatcagctggggctgtataaatttagagaagcaactaaagctgcagatccaagacatttagctgaaaattatgatgaacttaatactagaatgattcgggcaattaaaaaactccgtgaagaaactgttaatgaaaatcgagttttgttggtatcacatggcgactttataaagaccttagcaattaagtattggaataagagtgatggtatccatgatattgcattcccagataatggaagtattacccggggaatattaagtgatgatggaaaatttgaaatagttgattacaacattaaagctgaagacttttaggagtaattatgaggcaaaataaaattacaagtaagtatttttttgtaactgcattaaacataataattactttagctgagtttttaggtgggattttttctggatcattagccttactttcagatgctgtgcataatttaagtgatgtagcggcaattgtgatttctttcatagctcacttaattgggcaaaaagatcgtaacaaaagaaagacttttggctatcagcgtgctgaaacattagcggcatttactaatggtgttgttttatttgttattagtttctttttgatgattgaagcttttgagcgattcagtcagccacaagaagtaaagggaaagttgatgttgataatagctatcattgggttaatagcaaatgggatctcaatgctagtaatgaagagtgattctgctcataatttaaatgtgcgctcaacttttttacatatgatgtcagatgcgttgtcaagtgttgctgttgtaattggtgcggcaatgatttatttctggaagagtagcttaattgacccgttgatgacattgctagtttctatttttgtaatgtttgaagcctataaaatcactagaaaagcggctaatattttgatggaatcaaatcctaacgtagatttagatgaaataaaaaagcttgttcttacttttcccgaagttacaaatttgcatcatttgcatgtctggcgctatagtgatgatttgattatgatggatgctcatatcaatgtaactgaaaaaatgagtgtagtacaacttgaacaactttatatgaagatagggcatgagcttaaagaaaaattaggtattaatcatgttactttacaggcagaataccaacgcggaataaaggaaagcatgattgttttaaataaggatgattaatatggaaaacaaatactttttggcagctgtattactgattatgggaatctatgatatgtctttttattacaatcgtagacaccaaccaaataatcagcgaggattaaaggcatatctaatttttggaataatcttgttcataggcggattttacgccttatttagataggattttgataatggtaaaacttgttttagttagacacggtgaaagcattgcgaatgctaaaaatatttttacagggtggaatgatattagcttaagcaaacgaggaattgatgaagcaaaagtagcgggagaattaatcaaggatatcccagattttacaccaacacatatccatacctcgttattgtctcgagctattatgactgcgaatattattagtgaggttaatgattttttatatttacctattaccaaaacttggcgattaaatgagagacattatggagcactccgtggtattaataaagataaagcccgtgaaatctttggtgtggaacaaataaaaaactggcgtagaggctttgatgaagttccgccccttgctcaagatagtctaaatgaccgtcgctataacatgattgatcctcatatactgcctaaggctgaaagcttacatcaaactcaaaaaagattaatgccttattatcatgagcaggtggctagtcaactcattcaagggaaggatcaattaattgtagctcatggttctagtttacgtgccttaatcaaaaagcttgaatcaattgataatcatgatattgttaacttagaagtaccaaatgccgagccgattgtttatacaatgaatgatgagcttaaaattattgacaagaaaattttaagctaattacatttacattcataaaaagcgcacattttatggtaaaatctttaacagtgtaaagaaatttctaggtatggagaataagcgatgcgcaaaatattcttattgagaggggccccaggatcgggaaagtcctcatttattgcccgccatcacttacagccgtatgcaattagtcgtgattcaattcgcctacttttggctgacttaactgtatattatgaagaagaagcagactatttgcatcaagtgattccgcggcatgttaatgttcgaacagaacagttagttgataatttagttgaacataagatgtcttatggagaaacggttattgttgatggaacgcacattgctccaagtgcaattgaacattttaaaccgttagttgataaatatcgctatgaattatttgtagtcgatttaatgcagaataacactttggataacttgctcaagcgtaatcaaacaagaatgcactatgattgggttaagcctgaagttgttaagcaaatgtttaatacttataaggctcatccagaagttccagaatgggctaaaatgattacaccaaatcaaatggagcgggctttatctcaaagagaaagtaatttggatcactttgaacatgtgattgcagttcctgatggagtaaaggaagaagattttccacatgttcatatttctaatttttacttctcatttaatgataaatttactgaaaaatatggaacttatcgcaatgtaatttcaattgctaagacaagagaagaagcaattgaggagtttaaattgccttactttgtattcaagttccatcataagcattttctcatttcagcttatccaattagaaatgagatgttagatcctattagaaaagttaagggtgtatggacttattcaacagggttatataacttagctgattttgtaaaggaatttcctgaaaataaacaacaacatgtacatcaatttaatctaagtaagttagataacagtcggttgttacatatttggtaagataaaagagcttcacagaagtgaagctctttttgtatctgtttattaactaaaattccattgctaatgcgcccattggatcccatggcaataattgaataggattcttactgccgtcttcaaaggcatgtttaagttcatctgataagaacttcttattgataacagcttggtaaacaaaagcattaaaccaatcatcactcataacgaagtagcctttaaaaccagctttttcccccccatgagttttcaatcttccacttagttggtttgccgtcaactaagtcaacaccagtaatgaccatcgcatgatccattaaactttcaccagtatccagcttttcagccttactcattgaaaagtcaacgtcaaataattcatctctgcggtaaagcttagtatctaaaagaccagctctacgttcagaatctttaacaacatttgagccgaaccaaacaacttcgccagacttaagttgattaataattaattccttcatttcgtcaattggtaagttaaggtgacgaacttggcgaccgcctacaacattacctaaatattcaactgaaaataccttgtggaatggcttgtctgtagttggagcattaatagttgagatataatcgcttaaattccaaccaacatactttttaaagaattcttgtggggtaatatcacggtcaatgtggtaatttttgtcatcatcgcgatattcaaagtcaaattttttaggtggaactcccaaagaaattgctaaaactcgaaatacttcgttgagcatttcatcttttgcactttcaatttcttctgaactctttccggctttaacaagttctctaagctttaaaccatcttttctaagtaaagtgtttaaagtgtcatttaaagctgtggaactagttgcactgaaagtttctggatatacagacttgggaacaattccgtatttctcaattaatccacaaagcatgtcccattggccaccatcttgttgtggtgtagcaaataagaatgaaactttacggtcgcctaaatcttgattagcagtagcaattacgttttcaaagaaccaatttgatttttcaaatttgtcccagaagttagtgtaattttgggataattcaaatcccttaattttaaatttcttttgtagtgggtgacgcattgtattaagagcactaaacatccaacaacgcccagaagccttttgatctgcaactttaccagtttcgatttctattgaaaaagtagggtttaaatcaatttgggtttgtgtgtcttgactagctttaaaaattccgttagtttgagcagcacgtgcagcaatacgtgcatcctttcgacttgcaaaatctgctttaaagttttcaattgcagcttgtgaaatctcttttgccataatatcctcctaaattgctcttttaataaaagttaagtatattttaacttaattacctaaatgagtctattatcttaatgaaggtttataaactaaattagctaatgatagttggttttcttgaaaataagctaggatagtaggacctaatggcatgacttttaaatgattagcacgtgcgtagcttaatgcaaatttaatcagttcattaactaaatttgatttaatttctggatttataaatatatggtcaatagccataacttttccgccctttattaagttatagtgaagtcgatattctggaatctcatcattatttagataaaagttatggctttttaaatcatgtttaaacaaatttacacctcaaaaaaataaatttacttgttttacgtaattatataatagaaaatatgacaagtaagtattcgaatataaaggagtaaaaataaatttatgaaagttcgtggctttgaaatctgtgaaaaatataaagatgctgatattaaacttcctaagcggcaaacacttgctagtgctggatatgatatagaagctgcagaagattgtgtgattccaagtatttggcgtctgaactttgtaagaattttccgtttgattagaaatgggcatgaacttaatgaacgcgattatgaatatgctgatcaaattttgcaaccaattatggtccatacaggtgtaaaagcctatatgcctaatgatgaaatgctgataattgctaatcgttcttcaaatactgtaaaaagaagactttgcctccctaatagtataggggttgttgatagcgactattataataaccctaataatgaaggcgaattaatggtacaactaattaattatggagtacgacctatccacattaaaaagggagaacgagttgcacaagggatttttatgaaatatttgcggactgatgatgatgcaccagtatcccggcagcggattggtggatttggttcgactaaaaagtaaagagatgagataaatggcaaaagcacaaacaagatataagtgtcgttcatgtggctacatttcagcttcatatctaggaagatgtcctaattgtggctcctggaaccaatttgaaaaagaagtccaagaagtgcgtaagactagtaccaagcaaacggctagtcgtttaatgcctaccacaggcctacatgaacctgtaactctagaaaaggtaaaagctgaaaaggaaacacgcattccaactaaatttagtgaactaaatagggttcttggtggaggaattgttactggttcacttgttttaattggtggagatccaggaattggtaaatcaacattaatgctccaaattatgagtactttggcaaatgagcataaagtattatatgtttctggtgaagaatcggctagccaaatcaaacttagggcagaccgtttgggtgtaggagatagcggcatgtatctttatcctgaaactaatatgagtaacattcgtgatcaaattagtgatttaaagccagattttgtagtaattgattctattcagacaatgaatgaacctagtcttgattcgatggttggttcagctgcgcaagttagagaagttactagtgaattaatgcatattgctaagatagatcaaatcacagtatttattattggacacgtgactaaagaaggggcaattgctgggcctaagattttggaacatatggttgacactgtgctctattttgaaggggatgagcatcatgcttatcgaattttgcactcagttaaaaatcgttttggtgcagccaatgaaattggaatgtttgagatggaaaattcaggattaaaagaagtaacaaatccatcttcaatcttcttagatgagcggttacctaattcaacagggtcatgtgtagttgtatcacttgaaggaactagaccaattttagctgaagtacaagctcttgtagcaccaacagcctttggttatgctaaaaggacgaccagtggaattgattataataaagcagctttgttactagcagttttagagaaaagaggaaacttgatgttacaaaatcaagatgcctatttaactacgactggtgggataaaattatctgagccagcgattgatttggcaattgtcatggcaattggttcaagttataaggatatggaaattccttctgaagactgttttgttggagaagttggcttaactggtgaagtacgacgtgttaataaaattgaaagcagaattgctgaagctgaaaaaattggctttaaaagaatttttattcctaaatttaatatgaaggcaagttttgcaaatcgaaaaattgaggtcgtacctgtttcaacagtagctcaagctttaaagttagtttttggttaagggtttgaacttttcctataatatgcgtaaaatgaaaaagtaactactattttttagtgaaagaggcaattattttggctaaacaaaaaattcgggttagatatgctccaagcccaacaggacatttacacattggtaacgcaagaactgcattattcaacttcttgtttgctcgtcacaataagggtactttggttctaagaatcgaagatactgatactgcaagaaatgttgaaggcggttctaagtcacaaatggaaaaccttcactggttaggtattgactgggatgaaggtccagacaagggcggagaatatggcccatatcgtcaatctgaaagaaaagaaatttacaacaagttaattaagcaattacttgatgaaggtaaggcttactactcatacatgactgaagaagagcttgaagctcaacgtgaagaacaacgtgctatgggtatcgcacctcactacgtttacgaatatcaagatatgacagctgatgaaattaaggaagctcaagcaaaagctgaagcaaaaggccttaagccagttgttagaattcacattcctaagggtaaaacttatgaatgggatgatattgttaaaggtcacattagctttgaaagtgatactatcggtggcgactttgttatccaaaagcgtgatggaatgccaacgtataactttgcagttgttgttgacgaccacttgatggaaattagtcacgttttacgtggggatgaccatattgccaacactcctaagcaattagttgtttatgaagcgtttggctgggaaccacctaagtttggtcacatgactttgattatcaacgcagcaactggtaagaagctttctaagcgtgatgaatcagttttacaatttattgaacaataccgtgaccttggttacttaccagaagcaatgtttaacttcattactttacttggttggtcaccagttggtgaaagtgaaatcttctcacaaagacaattgattaaggattttgatcctaagcgtttatcaaagtcacctgctgcctttgatgaaaagaaacttgaatgggtaaacaaccaatatgttaagactgctaatagagatgaattgcttgatttagcacttaacaacttgcaagaagcaggtttagtggataaagacattactccagaaaagatggaatgggtacgtcaattggttaacatttactcagttcaaatgtcttacactaagcaaattgttgatttctcacatatcttctttgaagataagcaagctttgactgaagaagaagttgaagaaatcaagaatgatgaaggtcgcgttgtaattgaagaattcagaaagcaacttaaccttgtaccacgctatactgctgttcaagttatgaatgcaattcaagctaccagaaaagttactggtgttaagggtagaaagctctttatgccaattagaattgctgctactggttcaatggttggccctggtattggtgaagctattgaattaatgggtaaggataaggttgaacacaatattgatttgactttatctgaaatgactaagcaaggtttataatgaaaaaatcgcgttgaaagacgcgatttttttgtggataaagtgtgatgatagctgataaattgcagatttgatatacttaagttagatagaagaatagtagaaatgaggatagaataataaaaaaagaacgcgcaaccattttatttatttgcacggttatatttaatgccctaatcatatcctgtttagcagataacacattatttcaaattttatgtaatatagctctttgtgtcccaagtacaattgggatgtataggatagctaattttaaaacatatgttattagattgtcttggtggaatgttttaatttgtattccatatgttcttttattggtcgattacttaatttggagtgaatgggtaacaattattgctaatattttgatagttattttttcgacattaggtatatatactagtttaaatgtaaaaattaaaaatctaactaactagattaaagaggttgtttgataaataatcaaatgcctcttttttctatcatctgttagaatagtaacaagagaagttcaaaagggaaggtaagctaatgaaaatttataatactttgacccgccaaaaagaagaatttaaaccgcttgttccaggccaagttagcatgtatgtctgtggaccaactgtgtataactacatccatattggaaatgcccgttcaagtattgcctttgatacaattcggcgctacttagaatataagggttttgacgtaaaatacgtttctaattttactgatgttgacgacaagatgattaatgaagcacgagctgaaggtattactgtgccagagttggctaaacgctacattaatgcttttatggaggatactaccgctttaaatattgaaccagctacacttcaccctcgagcaacggaagaaatcaaagatattattgcttttataaagactttgattgaaaagggctttgcttatgaagttgatggtgatgtgtattatcgggctaagaagttcactggctatggcaagttaagtgatcaagatattgctagtcttgaagaaggtgcaagtcagcacgttaatgaagcagaatttgctaaaaaagaagatccaattgacttcgccttgtggaaaaagcaaaaacaaagtgatgaaattgcttgggattctccttggggcaagggtcgacccggttggcatattgaatgtagcgtgatgtctactaagtacttgggtgatacgattgatattcatggtggtggccaagacttggaatttccacaccatgaaaatgaaattgcccaaagtgaagctaaaactggtaagaagtttgtgaattactggatgcataatggctttgtgactgtgggaaaagatgagcaaaagatgtcgaagtcacttcataattttgtgactgttcatgatattttgaagcgtgttgatccacaagtattgcgctttttcatggcaagtgttcaataccgtaagccaattaactattctgaagaaaatttgaaacaggcagcaattattttggataaaataaagaatactgttttaaatgttcaagataagttaaaagaaactaattctcaagaaaatcaagatttgacaattgcaattgaagatagtgagaatcgttttaaagaagctatggacgatgattttaatgtacaaaatgcattgtcagtagtttatgatttattgccagtaattaataaaaatattagtgaagatactagcgacttatcagctcttagaaagtttttgcaacatctagaaaagtggttagctatatttggtgttgatatagataagttaactactgaaaaagtaagtgatgatgatgcagaaattgaagaattagtaaaaaagcgtgatgaggctagaaagaataaagattttgcaacaagtgatactattcgtgatcaattagcagagatgaatatcattttgcaagatacaccgaaaggaactaagtggagacgtgggtaaaataagacagctttttgaaaaagatataaatcctgatactttaaatggacaaactcttgcttatttaggagatgcagtttacgaaatttatattcgtcgccacttgttaaagggtggagtagtaagacctcaagttttacaaagagatgcaacacattatgtatcggccaaagctcaggcagctttaatttctaagatgcaagatgatcaaattttaacagaagctgaactcgctacttttaaacgaggaagaaatgctaagagtcatacacatgcgaaaaacactaagatagcaacttataagttatcaacaggatttgaagcaatttttggttatttagagttgcttgataagcatgatagaattgaagaattagcaatttggtgtattaagcaagttgaagcaggaggaattgatagttatgacttcagttaaaggtgattttgttttcggaagacatgctgggattgatttcttaaagaatgaatctgctgacaagattaacaaagtctttttgcaaaatggtgtacaaacagaatttgctaatcaagtttatggattagcaaagaagaagcatttaattgttcaagaagtaccaaaaaataaacttgataaattagtaccaaacgctaatcatcaaggtttagtgcttgcgatttctagttttgaatatgctgatttagatgatttagttgaaaaaattgctgataaagaaaatccatttttattaatgctggattcaattgaagatcctcataatttaggttctattttaagaagtgctgatgcaacaggagtagacggcattataattcccaaaagacgcgctagcggcttaactagtgtggtagctaaaacttctaccggggcaattgatcatgtcccagtttgtcgcgttaataatctggttcaaacaacgaaggaattaaaaaaggcaggctattggttctttggcacggctatggaaggacaagactatcgctattgggatactaaaggaaaatgcgttttagttattggtaatgaaggaaaagggattagtccgttacttttaaaacaaatggatcaaactttgactattccaatggtaggtcatgttcaatctttgaatgcttctgtagctacgggggttttactctatcaaatgctaaacaataaaatgcctttgtctaagtaatttcaaacataaaatgatacatgcttaattgaatttaggttcgctaaatcgaaaaaatacttctctgtagactgattaaaaatctatctcagaggagtttttttatgaaaacaatagaaaatcttattcaaagagttaaagaaaatgatgatctagctttgctcttgttatttgaaagatacaagccgatgataacagcagttactaaaagatattttattcgtaatctggatgaaaatgattggaatcaagaagctctaattgtttgctatgaatccgcaggattgtatgattttgagcgtggaactacatttggaaccttttttaggcttcgcttacaaaatagggctaagaatctattaaggtttgaacttgccaaaagacgagctctatatgcaagtgcaatctcttatgaggcactaaaagagcgagggcaaatttgtgatcctagttatgagcaagctagtttacctactagtattgaattaagcaactttatccaaactttatcccagttagaagtgattgcattgacggtaattaccggattggtagatttagatcaggcaagtatgactgcgcaagtaccacctgaaaccattaaaagagcgatagcaagaactagaataaaaatgagagcgtattttctgcgctaaaattagtaaactgtagtaaaataagagttgtagaaattattaggaggtattttaagatgacagaagatgttttaaagacaagtttgttggatcgtcacatgaaggaagtcttcgactggagtgactcaaacgttcctgttagagacgccatttggaactacttcatggaaaagaatggtaaaaatacccttaagactgaggaagatatgcttcctttcttgaaagactccgacgataaaattgaagccttcgtcaacgaaaatcttaagaaatagaccaactaaataattctacgcccggtggatacgcatgtttgtccactactaaaagactgctagttaagctagtggcctttttatttgtaataattgcgaaaattagatttttttgctagtattagatacagtttggaagtgagattatggcagtgaaaaaagcagcgttagcttgcactatttgcggttcgcgaaactactcaatcaccgcaagtaaaactcgcactgaaagattagaaattaagaagttttgtaaacattgtaaaaagatgaccttacataaagaaacgaggtagctatgtttaagttctttaagagtgttggtcacgaaatgaagaaggtaacttggccaacagcaaagcaaaatagacgtgatacaaccacagttattgtaacttcagttttatttgctttattcttaggtgctcttgactgggcgtttagcactttaacacaaatgacattttaatagtttcaaagctgattatgtgatataatcaacttgctagttaaaaagcctctatagagaggtttttttatttgtctaaatttaaggagaattataaatggtagaaacttcagcaaaaaaatggtacgttcttcatacttatgcaggttatgaagataaagttaagagtgaccttttatcacgtgctcaatcaatggggatgcaagactttatttttagagttgtaactccacaagaaactaaagtagaaacagttcgtggtaaaaaacaagaagttgaagaaaagattttcccaggttacgttttagttgaaatggttatgactgatgaaagttggtttattgtaagaaacactccaaatgtaactggttttgttggtagtcatggtggtggttctaagccttctccattattagatgatgaaattgctcgcattttagaaaaccaaggcgtagaagctaagaagccagatattgattttgaaattggcgaaacagtaactatcactgaaggtgcatttgacggaatggttggtaaaattaccgatattcaagaagataaagaaaagattttcgtttctgttgatatgtttggtagagcaacaactgctgaattagattatgaccaagtaaagaaatttgacggtaatgaataattaacctgcttttttgcttgttttatactgcttaagatggtaatatactagagtatctttattattgtgggaggaagactaggtaagtcttccattttaaccgcatcacggaatcaaggaggttttgaccgtggcaaagaaagttattaatgttgttaaattacaaatcccagctggtgcggcaacacctgctcctccagttggtcctgcattgggtcaagccggcattaacattgttggttttactaaggacttcaatgcaagaactgcagaccaaaagggtatgattatccctgtagttattactgtatatgaagatcgttcattcgaattcattactaagactccacctgcagctgtattattgaagaaggcagctaaggttgaaaagggttctggcgaacctaacactaagaaggttgctaaggtaaccaaggctcaagttaaggaaatcgctgaaaccaagatgcaagacctaaacgcagctgatgttgaagcagcaatgcgcatggttgaaggtactgctagaagcatgggcttcgaagtagaagactaaagcttactaggaacgtcggatcgttaattaaagttaacgaatcaagtgggagagctaagagggctcgtttgaccacatttgcaaggaggaatttcgcatgcccaagcatggtaaacaatatttagaagctgctaagaaagttgaaagaaacaagttttactcagtagctgaagcaatgaagcttgttaaggaaacttcatacgcaaagtttgacgcaactgttgaagttgctttcaacctttcagttgaccctaagcaagcagatcaacaaattcgtggtgccttagttttacctaatggtactggtaagacccaaaaggttatcgttttcgctgaaggtcctcaagctgaacaagctaaggaagctggtgcagacgaagttggttctgacgaattagttgaaaaagttcaaaacggttacttagactttgatgttgttattgcaacaccaatgatgatggctaaggtaggtcgtcttggtcgtgtcttgggtcctaagggcttaatgccaaaccctaagactggtactgttactatggacgttaagaaggctgtagaaaatgttaaggctggtcaagttgaataccgcgttgataagcaaggtttaatccacgcacctatcggtaaggtttcatttgaagatgaaaagttagctgaaaactttaatgctttaagagatgttattttacatgctcgtccagcaagtgctaagggtcaatacgttaagagcgtagccgtaagtgcaactttcggccctggtatccacctcgacccattgaacatgaactaataaagtttaaaaataaagaaaagggaatcgctaatgcaattccctttttatttgatttaaaagtgataccgcttacaagtaaaacgctcataattagcaattgttaagggagaatttacaagttataataaattcactgatataaatttttaataatcaatgagaagagattagactattgaaaaaaattttgagtattatcgtaccttgttataattctgaagattatctagaaaaatgtgtaaattctttagtagctattcaaaatgacgttgaaattattttgattgatgatggttctaaagataagacacctgagttaattgatcaatttgctcaaaaatatccaaagcaaattatcccaattcaccaagctaatgctggtcatggtggagctttaaatactggcttttcagttgctagtggtgaatatattaaggtggttgatagtgatgattgggttgactatggagcttatttagaaatcgtcaccttcttgaagcatttgattcagaaaaagcaatcagtggatttattaattagtaattacgtttatgataaagtaggtgccaagcataaaaaggtagttcattttccacatttgccaaagaataaattctttggttgggatgatgtgaaactttatttaggacaatatttaatgatgcactcattaatttatcgtagagaggtaattactaaaagagctcacttgcaattaccaactcatgtttcatatgatgacaatatttatgtctttgagcctttacgccacgttagaaaaatgtattatttggatgtcgatttttatcattatttcattggacgagaagatcaatcagttaatgaaaatgtaatgttaaaaaagatagaccaacaattactaattaataaacggatgatcaaattctttgcggaacatatcgatcctaatacttcattaggaagatatatgaagttctatttagaaataattacagcagtatcatctattatattaattcgtggaaaaaagcctgaatatattgaaaagaaagatgctctttggcaatatataaaaataaaaaataccaagttatattattccttaaagagacggccacttggaatttgtatgaatttgccaacaaaattaggaaataagatagcctctggattttatgttgtggcccatttagtatatggatttaattaatgcgtatttggcctatatatcaagataatggtaaaataataataagttaacatctcgctagtcggggtgtttttttatggaatagtgaggaaataatatgaaacagtatttagtttttgatattggtggaactaacttaaaatacgcattgttagataacgccggaaatattattgaaaaaaacaagaaaccaactgttaagtctggtttaaatgattttttaaaagaaatgtatgaaattgcagatcaatataatggcaatttcaaaggaattgccatttcatgccctggaaaaattgatgtagataataagattatccattttggtggtagcttgccatttttagatggtgccaatattcaaaaattattcggtgacaaatacggtgtacctgttggtgtcgaaaatgatggtaaggctgcagcacttgcagaaatgtggctaggtgctttaaaggatgtcgttagcggtgaaatgctcactttaggttctgaagttggcggtggaatagttgtcggtggccaattaattcacggcgcccacttccaagcaggcgaacttagctttatgcggtatgacatgaattgcgctgattggagcggttttactggccaaaaaggttcagcagttaatatgattaagcgcgtaaatgaagctttaggtaatagtaatttagaagatggacaaaaggcttttgaagcaattaatgctggtaatacacaagctgttcagatttttgaagaatattgtgccgatgtcgctaatatcattttatctgttcaagctgtagttgatggtgaacgagttgttattgctggtggtattagtgcccaagacattgtcattgaaacaattaagaagcaatatcaagctttagctaataagttttatcgcgttaagaatgaattaactatgcctgaaattgttcgtgccaagtttgaaaatgatgctaatatttatggtgcattatatgcattacttttagatattaatggacaaagtgaagaagcgaaataatattatttcttgactttcatcctgtaacttggtatattattcaaagtaaattctacctaagactcgggtgacgaatagtcgtctcaataccccgccgaggccagaagacaatgttgagttcaagctccatgtctcttggcatggagtttttaaggccttatagaatttataaaatctcatggaggtgaaccaattgagtaaagctgctattgctgcaaaggaaaagttagttgatgcgtttgctgaagaacttaaggctgccaaagctatcttggtaattgactacttaggtcttactgttgatgaagttactaacatgcgtaaggaacttcgtgaaaacgatgttaagatgaaagttatcaagaacacttacttaagacgtgctgcaaagaaggctggtatcgaaggtttagaagatactttcgtaggcccaactgctgttatctacactgataacgctgatgacgttactgaaccagctagaatcgtttctaagtatgaagatgactttgatgtaattaacatcaagggtggtatgcttgaaggcaagcttacttcaaaagaagaaatcaaagaacttgcttctatcccaggtcgcgaaggcttgttatcaatgcttgtttctgtattgcaagctcctgtacgtgactttgcatacgctgttaaggctgttgctgaatcaaaggatgaagattcagctgaataattattgtaattgtatttaattttaatatctaaatttcggaggatatttaaatggctttagatactgaaaagattattgaagaattaaagggtgctactatccttgaattaaacgacttagtaaaagctatcgaagacgaatttgacgttactgctgctgcaccaggtgctgctgcaggtgctgctgcaggtgctgctgcaaagactgaattcgatgttgaattgactgaagcaggtcaagaaaaggttaaggttatcaaggcagttcgtgaaatcactggtcttggccttaaggattctaaggacctcgttgatggcgcacctaaggttattaaggaaggcgtttcagaagacgaagctaacgacatcaaggctaagcttgaagaagttggcgcaactgttactgttaaataatttcgccttttaacaaaaagaagacaatctactttgagtaggttgtctttttttatttattggtaattataattttgttgtacaaatgttgcacatgttaaaaagggtcgattcactcgttctttgattaacccatcagttttgagtttttctttgttaattagataagcataagccttgagtgtctgtattcaaaaataatcactattttcctagtgatactttgatttttaataggaccatttttttgctttttagcaatttataattgaaattattatactaacgtgataaattacgttattatgattttagaacaaattgaaagggggaaactgtcaaattttttgtgtaaatagatctttctcgtaaattgtttttttaacgttttatttattcaaaataggattctaaggtatcctggacttgaccaaagcctttgtgaattcggttgaagtagcggtcattgtagctcattgcttggatgccaataaaagtatcaagcgactgttcagtcgggaactccgctttaggcttagccttgcgcttaatgacgttattaaaggattcgatcatgttggtagagtaaattgaagccctgatctgcttaggataattataaaaaacaagcaggtctggctcgatgtctttcaggtttctaatgacacgattgtagctcttgttccatttggcataaaaagcatgcaatacatcaacagcagccgctttattggcttgctggtgaatctgcttgaattcgttcatgattgcctcgcgatcgtccacgcgtactttagcgcagatgttgcgcataacatggaccaagcagcgttggaaatgagcttgaggataggtctttgccagtgctgctttcatgccgacaacgccatctgaaaggaaaagctctacttgctttaaaccacgagatttcatgttctggagcaacgccgtccagacttcaatattctcactaggcgcaatgcagtagtcgataacttccttgtgaccattaggcttgatgccaatggcaatatatactgcttctcgttcaaaagtttctcgacgcaacggtatatacgttgtatcaagataaacacaaaagaacttatcgctcagcttacgcttgtgataagcctcaactttaggaatcatttgcttagagatattagacacttgagctggactataatgactgccatacattttttcgatcaaattagctatttctctagtggttacacctttagaataaagctttataaccatatcttctaagagatcagtatgttgtttatagtctggcagagtgtgttgatgaaacataccattgcgatctcgtggcacttgtacctcaattgatccaaactgggtatcaattttacggaaatacgcaccatttctagaattaccagtattccagccatttctagcatagggatcatatcttaaaaaggcagtcagttcagattctaacatgtcattaacagcttgttggatttcatgacgaagcaaatcattaattttatcttgattgaatagagcttgagttatatttttggtaaaatcattcatgaaggagttcttctttctgtatgttttttttgttcaaaccaatcatacgagaaaggaactcctttttctaatgttttaggaaattaaattaaggaataattcatccttacacaaactattttacggtctcgaaagggggcttttgaatgtataatgtttttaaagtagttaattggtttcgcttaaaaaatgtagaagaattggttagtgaagatgtaaatgctgaaccattaactcaaatgaaggtaatgaaattactttattatgcacaagcaacctttttagtgaaatatggccaaagattatttgatagtgatattttagcttggaaatttgggccagtagttgcagaagttcatgacaaatatcgtggaagaagaattattgttgaatcaatttcttatgaagcatatcaagacttcagtactttggaatcagataaaagagcctctcaagttttgaatgcagtttatatagcttttggctcatattctgcttctactctgatgaaaaaaacacatacagaaatgccttggaagtctacttctcagggagctaaaattgaagatgataaaatgaaagaattttataaagaaactgggcttgatactgaaatatcagaaaaatatgatcatgttattatgagaaaactttatgaagaaaatagagaagcaatggatattttaaaatataaatgatatatctgagtagtaagcaaataatagaaatgaataagcttgtcctagctgaagcagatgaaaaatttcaagggattcagtatgaagatggattgtccattatcgaagagcaaccgcaggctatttattttgggcaggaattatatccctcaatatgggaaaaagcagcatttataatgcaaaaaatcactaaaaagcatatttttggtgacggaaacaagagaactgcattattagctacagtttttttcttgtatgaaaatggttataagtggcaaagaagccaaaaagataaagcagatcttgttttaatggttactaaattagatgattcaaaagaagctatgaattttttagccgatgtattaagtaaagagtgtatagctattaattaatttgagtcagcattcagctggctttttattttttgatttttagctatatattcttgcaattaaatatataactacaatagaatagaaaaacaacaattataaaatcggcctaatctttcacagccatatggggttgcgtttgtagacaacttggttgtgttaagtcaaattataatttcgccttttaacaaaaataagacaatctactttgagtaggttgtcttttgtttactgttttttgctataatctttactagaaatgaggatagatatggcagaacaatattttactgaaaatccaaatgctaaacatgatttaaaaattgttgattatcatcttgatggtattgatcttaaattaactactgatgctggcgttttttcaaaaaaacgggttgattatggtagtggtgtcttaatccgaaatatgctggcagaaagtccagtctctggcaatattttagatgtgggatgtggctacggcccgattggtcttttcgctgctaagaagtggccagagcggcaagtcgacatggttgatgttaatgaacgggcaatggatttagctcgaaaaaatgctgaagtcaatggtgtgactaatgcaaatatttttgcttcaagtgtgtatgaaaatgtggataagcagtatgcgatgattttaactaatccgccaattagagctggtaagagtgtggttagcgaaattttagctaaaagtgcagaacacttggtagctggtggagacttgctagttgtaatccagaaaaagcaaggtgcacctagtgcaaagaagctaatggaaaccacttttggtaactgcgaaattcttgaaagagataagggttactacattttaaggagcgtaaaataaaggacaaaccatgttttccagtgaagaaaaaaagcattatatggaattagcttttgctgaagctgaaaaggctgaagcacaagatgaagtgccaattggagcaattgtagttgcccctgatggacaagttatcggcagaggctataatcgacgagaactagataatattgcgactcaccatgcagaaatcttagctatcaatgaggcgtgcaaaaatctaaattcatggcggttaattgactgtagtctattcgtaacgctagagccttgtgcaatgtgtgccggtgcaataattaatgctcgcctaaaagaagtgttttacggtgcaccggatcataaggctggcgcaagtggtagcgttgtggatttatttgctgttgaaaagtttaatcatcatccacaagtaattagaggactttatagcgaaaaggcaagtaacatgttgaccaattttttcagagcaattagagctaagcaaaaagaaaaaaagttaaaagctaaaacgaaagaaaacgatgcaagccctagccaaatcgactaaaatacgttattatatttatcgggcaatgtttgttttctgaatcgtgtcaggaccggaaggtagcagcactaaggaaattcaggcatgtgccttttattagataattaacaagctcctagcagcactagctaggagtttttttactaaggagaaaactaatggcttatcaagcgctataccgtaaatggcggcctaggacattcgatagtgtagttggacaagaagctattactgatactctgaaaaacgctattattcgaaataaagtttcacatgcttttttatttgctggtcctagaggtactggtaaaacctcttgtgcaaaaatttttgctaaggccttgaactgtcttaatttgcaagatggtgaaccatgtaatgaatgtgaaaactgtaaagcagcagattctggggcaatgccagatattattgaaatagatgcagcttctaataatggtgttgacgagattcgtgaaattcgcgataaagtaaagtatgctccaacccaaggaaaatataaggtttatatcattgacgaagttcacatgctttcaatcggtgctttcaatgccttgcttaagactttggaagagccacctgaacatgttgtatttattttggcaactacggaattgcagaaagttccggccacaattatttcgcgaactcagcgttacaactttaagcgtattagcaagcaaaatttagttgatcgtatgaaatttattcttgagcaagagaatattccatatgaagattcagctttgcaagtaattgcacaagtggctgatggggggatgagagattctttaagtatcctcgatcaattacttagttttgaaaaagaaaaagttgaatataaagatgctttaaatattacagggtatgcagctcgcgagactactgagcaactatttttgaatttgctgaatcaaaaggtcagtgaatcattagacttaagtcataaacttttacaagatggtgcaactgctaaaaatttgctttctgaattaattagtttggccacagaaactatgttggtactcaaagcaaacaaagatagcgagtttttgaccaaagattttactaatcaaattacaactgttccagaaaagcgatatttccagctgattacggcagctaacgaagcgcttaatgatttgcgatttactaatcaagaggaaatacctctagatgtatttttagtaaaagtagctaatccaattgaagaatctggggaagagaaagcagattcgcataatgctgaaataaatcctgctattaatcaagaattatcagacttgaaggcacaagtagtggctttagccaagaaagttagtcaaacaaatggctttgcttcaagcaaccaagtatttaaaattgatgatgccaaaaagaaaaacgaatcacctaaagccagtgagccacaggctaagccaaaacctaaacgtaaaaagccagttaattcagaattaaatcgccaagctgtttatgctgttttggaaaaggcaacgaaaaaagatttggaagatgtacgtaatgtctggccagacttacaatccgttttgggggtttcagaacaagccttattaaaagttttagaaccagttgctgctagtcacaatcgagtagtaatgaaatgcaaatacgccttttggtttgagagaacgagtgaaaatactaatttaatggcaaccttgaattcagaattagctaaattcttgaagcacgattctgaaattgtattagttccagatgcagactggctccaagtcagaaaggatttccttgctaagcataaagatgaaatcctagctcgtcaaaaacaaggaaatgccgaaattgaagttgatcagcatcaagaagatgaccaagaaaagcaagtaattgataaggcaaaagaaatttttggctctgacaatattaatgtaaaagattaaaatagataataagaataaaagaaatagagaggtatttataatggcaagaagacctaattttggtggtatgggcggtatgaatatgcaacaaatgatgaaacaagctaagaagttgcaagctcaaatgcaagaagaacaagctaatattactgcacaagaatttgttggaaaatcagcagatgatattgtgacagctactttttcaggtgatagacgtttaaaggatattcaaattaaacctgaagcaattgatcctgaagatccagatatgttgcaagatttgattattgatgctgttaataagggcttaactcaaattgatgaagcaacacaagctggtttaggcaagtatactaaggggctattttaatgcaatacccattaccaattgcgcgattaattgaaagttacatgaagttacccggaattggtgaaaaaactgcaaccagattagcattttatacattggacatgccggaagatgatgttgaacaattttctcaagctttaaaagatgttaagacacttttacatcaatgttcaatttgtggaaatattactgaaacagatccttgtcaaatatgtcgtgatagtaatcgagatcacagtaccgttatggtagttgaacaaccaaaagatgtcatggcctttgaagaaatgggagaatatgatggcatgtatcatgtgctacatggcgttttatcaccaatggaaggaatcggaccagaagatatcaatattaaaagtctaataacccgtcttcaaaaagatgatgatatcaaagaaatcattattgcattaaattcaactcctgaaggagaatctactgcaatgtatattgcaaaacttttgaagccagcaggtctaaaagttactagattagcttcgggccttgcagtaggaacagatattgaatacgcaaattcgattactttaaagcgagctgttcaagggagaatcaacttatgatttttggaaaaaagacgcaagtaaaagaaataggagatcaacatttgatggtaactatttcgaaattgcaaagacagttgttgaatgaacaagagcttgatccgacaacggttgattattcagaagataacattatgactagtaaaattttaaaagctaagtatagttttttgtacagtgtggcaagacaaagacacacaaaatctagtatcactaataatgcaattacacaataaattgagtcccctttggggactttttttatttcaagtctattaataacaagctttttcaagtaaaatcaattattggaggaatttttattaatggcaggttattttattacatttgaaggcccagatggagcgggcaaaactactgttttagaaaaattaattgaaaaaataaaagagcaagttacttgtgaaattttagtaacgcgagaacctggtggttctaaaattgcagaggcaattagagaaattattttagatcctgaaaatacagaaatggatgatagaacggaagccttattatatgcagcagctagaagtcagcatatggctgaagttgtttttccagcattagaggcaggaaaattggttttctctgatcgttttgtagattcatcattagcatatcaaggaatgggaagaaatttaggaattgataaagtagcagagattaatcagtttgctacagatggattaaatcctgatttgaccttatttttagatattaaacctgaagatggattggctcgaattgccaaggttcgtccagataaagaagatcgtcttgaaaaagaaaaattatctttccacaaaaaggtttatactggttatcaagaaatagtaaagaaatatccagaaagaattaaagttgtggatgctagtcaagatgttgattatgtagttgctgattgtttaactattttaaagcagcaattaccagacttatttgaggtaaaataatgaaacttatttatgcaattgttcaaaataaagattctggtcgtctttctaagaaatttaatgaaaataacgttcgtgcaactaagttagcatcaactggtggctttttaagtgaaggtaatactacttttattatcggaactgaagacgaaaaggtagattctgttttagaacttattaaagattgttcacaaaagcgcaaagaatttgttaatccagttgttaatagtcatgcaggtgaatttactcaacctcttgaaattacagttggtggagcaattgtctttgtaaccccagttgatgagtttaagcgattctaatgattgatttaaagcaagccgcacccaagcaaattagttttttaaaaactgcttttgaacaagataagttggctcatgcctatttatttgtggatagtttaacgcaaagagctctagcaactgcttattggctagcctgtctagttaactgcacgggaactaagcgtcctgacggcacttgtattaactgtgaaagagttttgtctggtaaccatcctgatgtatttttagtaaaaccagagggaaaacaatcgctttcaattgatcaaattagacctttgaaagaggaactagcaaaaagtccagttgaaggtaatagacgctttttctttattgaaaatgctcaaacgcttactatgccagcagctaatgcattacttaatttgttagaagaaccggtagcaccagttacgacgattttacttacaaataatgctcaacaaattttgccaacagttcgttcacggacccaaattatagagtttaatgatttggctcaagcaaattctaaaagccaggatttacttttatatggctttagtcaagaagatttggagaatttgggtgaaacggcagagcttgataaggccgttaagtatttttaccaagaattattggaaaataatgatttagcagttgttagtgcccataaattggctgggatgatgaaaaataaggtgcaagaagattatgttttttatcttttaaaaaagttttgcctagatggtattaagcagcaacaattgcttggtaatcaggctttgttagggagattattagattgtgacaaaatgaagtttagtaatgtgagtttcctaaatagacttgattatttggcacttagttaaagaagtaggtgagtgaagtggatccatattcagaattaagacaagttcgacaaaaccttgaagcaatgtcgaaaatggttgcaggattagagaatgatattcttgatactttaaaagaaaatactgaattaaagatggaaaatcagcttttgagagaaaagcttgataaattaactgctgaaaaagcaggtaaagaagttaaaagtcaaagtggcttggcttccctacgcaaaatttatgaatctggttatcatatatgcaatatgtattatggaactcaccgtgatcctagttcagattgtatgttttgtttagatatattggataactttgaacataagggaaaaggagtaggtcatgcaagtacaaagtagctttaaagaagacaagggaaagttgtacctagtaccaactccaattggaaatcttgaagatataactttacgtgctaaaaggattttgcaagaagctgattatattgctgctgaagataccagaactagtggaattatgctagataagattggaattcacaacaaaatggtagctttccataaatttaattcaaagcaaaaggctcccgaattagttcaaatgatgaaagaaggaactgtaattgctgaaataagcgatgcaggaatgccagtgatttctgatccaggttacattttggttcaagaatgtataaaggcagatatacctgttgttccacttcctggaccttctgcttttgcaactgcattaattgcatctggttttgatgcacaaccttttacttattatggttttttaccaagaaaggctagtgaacaaaagccttattttgaagcaatgaatcaggcccatgcaacgtcgattttttatgaagcaccacatcgcttaactaagactttaactactcttgcatctgttttagatgataatcgtcagattgtttgtgcaagagaactcaccaaaattcatgaagaatttatccgtggtagtataaaagaagttttggctcatttcgaacaagtagatccaagaggagaatttgttgtacttatttcaccgaatactgatgaaacgccaaaagtttcaatggatgaattagtgaagcgagtagatcagttagttgctaccggaacaagcaaaaaagatgccataaaacaagtagccaagcaaaatggcgtttctaagaatgatttatacgatttctatcatcaaggataactatgaaatatcaagaagactatcaaattcaatatgcagattgtgatgaaacaggccatgttaagttacaagccttgattgatatttttatgcatgtttcaaatcgccagcttgaaaattctcaagctggttctaaagaaatggcgatgaaaaatcagggctgggttgtaacgcaatatcatatggagtttaaaagacttccagttgttgctgaacatgtacaggttgtaactaatccagttggttataatcgtttttttgaatatcgtgattttgcattaatagcagataatgaagaaatcataaaagtacagagtcagtgggttattttagatttagaaaaaagacgaatcgttccagctgattcggaaatgatggctcgctttggttccccattattgaaaaagaatccccaaatgcgccggctaaaaaagcaagagtattatcaacaaaccaggcaatatcgggtgcgatatgatgatttagatttaaaccatcatatgaccaattcgcattatttttcatggatggaagatatgcttgaacgcaaatttttaaatactcatgagccagaaatggttgatattaaatttgataaagaagtattatatggccaagaagttacgtcaagtttaattattaatgaacaaacaagttaccacttaattagtcagggtgatcaagtggcaacaattgcagaaattacgtggaaaaagaggaacaatgaataaatataaagataactttttcaaattatctcttcaaaatttagtattattgggtttggttattgcaattaaactttgtttatcaagtgttgcaattggaccagctttttttaagattggcttagcctttttaggaagtgtagcattaggttacttatttgggccagtttggggtggcttaggtggtctggtgtcgagtcttttacacttgataatttttggagatcaagcaaatgtcttattaggaacaatgctgtcagcaattttagtacctatgatatatggctttttcttttataataaagaagttaagatttggcgagtagttatggggcatttgacggtcacgattttaattaatattatgcttaataactacctcttttcgttagtttcaggcgtttcgcttcaagtggcattcattcagagattacctaaagaagtgattttgccatggggacaaatgatattaatgtattttgtattaaaaggactggttcctataagacagcgtatgatttcttatgaaaaaagtaaaaatagaattcaagaaatggaaggagagactaattaatgaaaaagtttttctttaagctaagtttacaagaattgatattcttggcattagttattgcaataaagattattttaagtcggttctcttttggtcctacatatgtaaaagtaggtttaggttttattggtagtgttgccttaggatacttctttggtccaatttggggtgctgtaggtggtggtattagtgatttagctagttcagcactttttggaaatgaaggtggctttttcattggctttactttaacagcaatgctaggaccaatgatttatggattttttttctatcgaaaaccgattaaaatttggcgaattattgttgctagtttattagttacaatttttgttaatgtattattgaatacagtttggctacattttatttataaaatgtcgtttacagcagccttaacagccagattattaaaagaagtaattgttccttggatacaaatgattattattttcttcgttttaaatggcttacaacgagtaaatgcgcgtagggagaaattagaaaagagtagaatgtaatgaaaattttgagtgtttcaactgctaccaattttttaactattagtcttaatgaagatgaaaaagttatcaagcaagtagaagaaaaagatcaaagaaatcatagtgaacatctaagacagcgtatgatttcttatgaaaaaagtaaaaatagaattcaagaaatggaaggagagactaattaatgaaaaagtttttctttaagctaagtttacaagaattgatattcttggcattagttattgcaataaagattattttaagtcggttctcttttggtcctacatatgtaaaagtaggtttaggttttattggtagtgttgccttaggatacttctttggtccaatttggggtgctgtaggtggtggtattagtgatttagctagttcagcactttttggaaatgaaggtggctttttcattggctttactttaacagcaatgctaggaccaatgatttatggattttttttctatcgaaaaccgattaaaatttggcgaattattgttgctagtttattagttacaatttttgttaatgtattattgaatacagtttggctacattttatttataaaatgtcgtttacagcagccttaacagccagattattaaaagaagtaattgttccttggatacaaatgattattattttcttcgttttaaatggcttacaacgagtaaatgcgcgtagggagaaattagaaaagagtagaatgtaatgaaaattttgagtgtttcaactgctaccaattttttaactattagtcttaatgaagatgaaaaagttatcaagcaagtagaagaaaaagatcaaagaaatcatagtgaacatctaagacagcgtatgatttcttatgaaaaaagtaaaaatagaattcaagaaatggaaggagagactaattaatgaaaaagtttttctttaagctaagtttacaagaattgatattcttggcattagttattgcaataaagattattttaagtcggttctcttttggtcctacatatgtaaaagtaggtttaggttttattggtagtgttgccttaggatacttctttggtccaatttggggtgctgtaggtggtggtattagtgatttagctagttcagcactttttggaaatgaaggtggctttttcattggctttactttaacagcaatgctaggaccaatgatttatggattttttttctatcgaaaaccgattaaaatttggcgaattattgttgctagtttattagttacaatttttgttaatgtattattgaatacagtttggctacattttatttataaaatgtcgtttacagcagccttaacagccagattattaaaagaagtaattgttccttggatacaaatgattattattttcttcgttttaaatggcttacaacgagtaaatgcgcgtagggagaaattagaaaagagtagaatgtaatgaaaattttgagtgtttcaactgctaccaattttttaactattagtcttaatgaagatgaaaaagttatcaagcaagtagaagaaaaagatcaaagaaatcatagtgaacatctaagacagcgtatgatttcttatgaaaaaagtaaaaatagaattcaagaaatggaaggagagactaattaatgaaaaagtttttctttaagctaagtttacaagaattgatattcttggcattagttattgcaataaagattattttaagtcggttctcttttggtcctacatatgtaaaagtaggtttaggttttattggtagtgttgccttaggatacttctttggtccaatttggggtgctgtaggtggtggtattagtgatttagctagttcagcactttttggaaatgaaggtggctttttcattggctttactttaacagcaatgctaggaccaatgatttatggattttttttctatcgaaaaccgattaaaatttggcgaattattgttgctagtttattagttacaatttttgttaatgtattattgaatacagtttggctacattttatttataaaatgtcgtttacagcagccttaacagccagattattaaaagaagtaattgttccttggatacaaatgattattattttcttcgttttaaatggcttacaacgagtaaatgcgcgtagggagaaattagaaaagagtagaatgtaatgaaaattttgagtgtttcaactgctaccaattttttaactattagtcttaatgaagatgaaaaagttatcaagcaagtagaagaaaaagatcaaagaaatcatagtgaacatctaagacagcgtatgatttcttatgaaaaaagtaaaaatagaattcaagaaatggaaggagagactaattaatgaaaaagtttttctttaagctaagtttacaagaattgatattcttggcattagttattgcaataaagattattttaagtcggttctcttttggtcctacatatgtaaaagtaggtttaggttttattggtagtgttgccttaggatacttctttggtccaatttggggtgctgtaggtggtggtattagtgatttagctagttcagcactttttggaaatgaaggtggctttttcattggctttactttaacagcaatgctaggaccaatgatttatggattttttttctatcgaaaaccgattaaaatttggcgaattattgttgctagtttattagttacaatttttgttaatgtattattgaatacagtttggctacattttatttataaaatgtcgtttacagcagccttaacagccagattattaaaagaagtaattgttccttggatacaaatgattattattttcttcgttttaaatggcttacaacgagtaaatgcgcgtagggagaaattagaaaagagtagaatgtaatgaaaattttgagtgtttcaactgctaccaattttttaactattagtcttaatgaagatgaaaaagttatcaagcaagtagaagaaaaagatcaaagaaatcatagtgaacatctaagacagcgtatgatttcttatgaaaaaagtaaaaatagaattcaagaaatggaaggagagactaattaatgaaaaagtttttctttaagctaagtttacaagaattgatattcttggcattagttattgcaataaagattattttaagtcggttctcttttggtcctacatatgtaaaagtaggtttaggttttattggtagtgttgccttaggatacttctttggtccaatttggggtgctgtaggtggtggtattagtgatttagctagttcagcactttttggaaatgaaggtggctttttcattggctttactttaacagcaatgctaggaccaatgatttatggattttttttctatcgaaaaccgattaaaatttggcgaattattgttgctagtttattagttacaatttttgttaatgtattattgaatacagtttggctacattttatttataaaatgtcgtttacagcagccttaacagccagattattaaaagaagtaattgttccttggatacaaatgattattattttcttcgttttaaatggcttacaacgagtaaatgcgcgtagggagaaattagaaaagagtagaatgtaatgaaaattttgagtgtttcaactgctaccaattttttaactattagtcttaatgaagatgaaaaagttatcaagcaagtagaagaaaaagatcaaagaaatcatagtgaacatctaagacagcgtatgatttcttatgaaaaaagtaaaaatagaattcaagaaatggaaggagagactaattaatgaaaaagtttttctttaagctaagtttacaagaattgatattcttggcattagttattgcaataaagattattttaagtcggttctcttttggtcctacatatgtaaaagtaggtttaggttttattggtagtgttgccttaggatacttctttggtccaatttggggtgctgtaggtggtggtattagtgatttagctagttcagcactttttggaaatgaaggtggctttttcattggctttactttaacagcaatgctaggaccaatgatttatggattttttttctatcgaaaaccgattaaaatttggcgaattattgttgctagtttattagttacaatttttgttaatgtattattgaatacagtttggctacattttatttataaaatgtcgtttacagcagccttaacagccagattattaaaagaagtaattgttccttggatacaaatgattattattttcttcgttttaaatggcttacaacgagtaaatgcgcgtagggagaaattagaaaagagtagaatgtaatgaaaattttgagtgtttcaactgctaccaattttttaactattagtcttaatgaagatgaaaaagttatcaagcaagtagaagaaaaagatcaaagaaatcatagtgaacatcttgatccaatgattgataagcttctcaaagattgcaatctttctttgaagcaaattgatcgtttggcagttgcaattggtcctggttcttatactgggcttagaattggaattactactatgaagatgtttgctagcattttaaataaagaaatagtaggaatttccacattacaagctcttgctgctaataagcaagctgctgatagcttaactttagcttgtttagatgctagaaataataatttctttgccggtgcttatgtgaatggtgaggcggtaattgcagatggccattatagttttgaagcgctactagaagaactaaaaaaagttttagctgaaaaaaacattcagaaattaattattttgggttcagggatggagaagcatgaagacttgctaaatagccttccttgtgacattatttggggtaatgaagaagaaaatctggttcatgctagtcagattgctaaattagcattgaccagtgaagttattgatgcagatcaacttgtaccacgctatttaagacggacccaagctgaaatggattggcacaagaagactggtaaaccatttgaaccagatagtaattatgttgaagaagtttaggcatttttttaaagaagaacccgaagttaatttgaattttacgccttatgtgacgactcttgcagggcgaactatgcaagttatgcaagcaagtgaagtgaatatacctgatttattagaattagaaaaaaaggtatatcaaggtaagcagccctggtcttcattttcatttgctagtgaattacgtaaaaaacataattctttatatttagttatttatgataaggctcaactagttggatttattggaggaagattcattccttgtgaaggacatattactaacatagctgttgatccaacatatcaaggtcaaggaattggacattatttgataaatttaatagttgaaattgctagaaaaaacggagcaaggcaagttagtcttgaagtaagagctgataatgaacttgcacaaaaaatttataaaggtttaggctttgaagctcaatttattcgggcaggatattaccaagatgatcatatggatgcaataaatatggtcttacatcttaaagggaaagaagatacaaagtgactgataaaaaggatattagaatattagcttatgaaagttcatgtgatgaaacttcaacagcggttatcaaaaatggtcgtgaaattgaaagtttagttgttgcaacacaaataaagtcccatcaacgttttggtggtgtagttccagaagtagcatcacgacaccatattgaagtaatcactcaaattactaaggaagcattaggtgaagctaaagtcacttgggatgatatagatgcaattgcagtgacttatggtccaggattagttggtgctcttttaataggagttagtgcagcaaaggctgcaagtatggcaactggaattcctttaataggtgtcgatcacattatggggcatatcatggctgcgcaacttgaagatgaaatagagtatccagccttagctttacaagtttcaggtggtcatactgaactagttttaatgcatgatccaattcatttcgaaattattggagatacacgtgatgatgccgctggagaagcatatgataagattggccgggttttaggagtaaattatcctgctggtaaaactattgatgcttgggcacatcaaggtcatgatacctttaacttccctagagcaatgcttgaagatgatgattatgatttttcattttcaggactaaagagtgcctttattaatacatgccatcacgcagatcaaattggagaaaagcttgataaatatgatttagctgcaagttttcaagctgcagttgttgacgttttaagccataaaacaattcgggcaattaaagaatttaagcctaagacttttgttttaggtggaggtgttgcagctaataagggattgcgtgaacgtttagaaatggaaattgctaagctagacgataagcctaatgtaataattccaccgatgaagttgtgtggggataatgccgcgatgattggtgcagcagcctataacttgtataaggcaggtaagtttagtggattagatttaaatgctgatccatcacttgaattaccatatgctgatgctattttggatagataaagaaaagtagttcttaaatgaactacttttttgtgcataaggtgttgataataaattaaatgcattataataaaacatgtaaataataaacttacagcgttaagcgaaagtggagttgataattatatgaagtattcagttactgcagcaattggaaatttagggcaaagaattaacaattaaacaatttaatcatgatgaatatgtacaatgtcttgaaagtactggagtaagtacagaaatggcaactttatttgcatcatttgatgaaccaattgatgatggctcacttgatgtaaatagtaatgtagttgaaactttagaccatccacttttacctttagaagatgcgattaaggaagtaattgcacgttaaaaattaacaagttagaataagtaacatgaagtattcgtataaattcagtgatgctattcacttactcagctatttagaaatatttaaaaacgaagatttatctagtagagcaattgctgctagtatagagtccaatccaagtattattaggcagttaatgtcagacttgcgtagtgcggtcttgattgaaactagacagggtaaagcaagtgcaagattaattagaaaacctagcgatataactttatttgatatttatatggcaatagatatagatcatgaattacttcatgttgatccaaagactaatctcaattgttcggttggtcggaatgttcaaacaagtctagttggtttttatgaagaaattcagaatagtgcttttgaacagatgaagaaaataactctgcaggatgttattagtgatcttttagcaagagatacatccattaattaaaaaccactcagttttattactgggtggtttttaattgcgattaaagttagtaatgctataatatctagtaatttaaattactttgtgaggtgtcaactatgaaagtcaataaaatagcaatcgttagcctatcaagtggtattttaggcgaagatgcagtagctcatgagagagaattaggtataaaaagactcaaagatttaggcctagaagtagagtttatgcccaatagtttgaaaggactagcatatatcaagaatcatcctgaaaaacgtgctgaagatttattggcggcctttaaagattactcagttgacatgattttatgtgcaattggtggggatgatacttatagacttttgccatatttatttgagcatgatgaattaaagcaagttgctaaacaaaaaatatttttaggtttctctgatactactaagaatcatttcatgcttaataatctgggaataaagactttttatggccaagcatttttaactgatatctgtgaattagataagaagatgttgccatatagtcaggcgtattttgaagagttaattaagactggaacgattaaggaaatccacccaagtgatgtttggtatgaagaaagaaaagattttagtaagaaagctgttggaactccaagaattagtcataagaataatggctttgagttattaagagggcccaagcaatttagtggtgaaattttgggtggctgcattgaatcaatctatgatttctttgacaattcacgctatgaagatactatttcgctaacgcaaaaatatcatttattccctagtcttgatgaatggcaaggtaaaattttactcttagagtcaagtgaaactaagtctgcaccagaaaaatatcgtcagatggttcgcgctttagcggactatggtatttttgatgtggtaagtggtgttttagttggccaaccgcaagacaaagcatattatgaagaatacaagcagattttgcttgaagaaattcaaaatgccgacttgccgattgtttataatctaaatgttggtcacagtactccacactgcattgtcccttttggcgtcaaagctgaagtagatataactcaagaagtaattaaattttagttgtgccattcacaataaaaagtggtacatttaagttaacctagttttaggtattactacaatcgaaaagaggaaactactatgagtaagtatgttgtagaactaaacgcagaagatttacaaatgctgaaggactgccattcaaagaacccttcaattatgaaatcattaaacgaagctaaagaagattagttaaataaaaaagcaccgttaggtgctttttcttttacttaaacttttgaattgtagtattttttgacgaggtaaaaaattggcaaacctagagcaataaaacctaagaataaaatcacaccgtgaaagtcattgatgatttcgcaaactgcaacaaaaattccaccagcaatggcaatgattggaactagcggataaagaggagttgagaagggacgtttattattttgttttcttaaaatgaaaataccaaaaaatgctagaatgtagaagcaataaattgaaaagacacataaatcagacaagcgatttggatcaaaaaataacatcatgataaaagctaatgctgaaacgaaaactgtagcagctattggtgctttacctttgggactaaggtaggataagcttttggaaaaggggatgtcttttcgcttggccatagcaaagacaattcgaggaaaagttaacactttcccattaagtgtaccaagcactgaaatgataataccagctgctataattttgccaccaagaggaccgaaagctttagcagtcatatatgctggagcattttcacctaagtggtgaattaggttagcaggtaagaaacgtaaaattccaatcgtaattaaagtataaataactaaaacagtactaattcccaaaattattgcctttggtagcaatttttgaggatttttcatttcgccacctaaattagcaattagaatccagccatcatatgcaaataaagtagctaagatggcaacaccgaaattgctagttgattgactaacctcagttactgtttgacttaaggcattttgatttccccagaaaaggccgaaaatgataatagctgctatcggaatcaattttccaagagtggttacaactgaaaaagtagcactaattttattttcaaagagattcataagtgcaattaaaatgacactgccaatcgccaagggaatacgccaattagaactaagaccgaaaaagtttgccatcaaaatactcataaagccagaaactgaagcaattattgccggaccataaattataatctgcatccagccagctaaaaatccagccattctgccatagatgttttcaatataaatataaaggccaccggtgtatggcatctgggcaccaatttcagcaattgttaaaccgcttgttaaagtggtaataccacctaaaatccaagctaaaattgctaaagcagatgaaccggcactgtctaaaacagatgcttgtttgaagaaaattcctgaaccaataatcgttccgataacaattgaaagagctgaggtaaaacctaatgaacgttttaagttttcgtttggctgctgcttcatcttgattactccattcttttgtaaataaaaaccgactcttttattgtaagtaaaaaataacttagtggttaaaagagtcggcattttattagcttaattttttgaataccaaaatcactcaaccacaagtaaagttgaagttgaggaagaggagttattaaattttgaaatactaaattgtaacattttatctcctcctggtatcaattacttaagattaccacagttaaaaatgtggttgcaagcaaatatattttaagatttagcggtcaactgctactaatgtagttaaagtggcgccatagtaatcatcttgaggcaagggcttactgtagatgtattgttggctgacaaataagttatcaaagccttgcccacgaaagtgattaactccataaaaaataggagcgctgaagcttggagattgattcttaactagtgttttaccggttaatttataaccaccatagacaatattttgcttagcaaaatattttaacattcggcgctcaattaatcttgatttagcatcatgccctttggcaagaatccaaggtaagcgacaggcattgtaggcataataaccatcatttttgccagcgattgttttgggagcaacagccttaactgactttttgcttgcccaagcaaaatctggaattaagccggtcttatgttgattagataactggactaatttagttaacattgcattcttaacttgacaccatttatcattcttagttgtcttagctaaattcgtaaaaataaatggtaatacatcagaagttcgaaataagtttgcataattagaatctaatctgacccaatccccagttgttaaaagacccgtcttaggattatattcataacgcaaaatatcatttgcaagtttaatttctaaattgcgataatacttcgcctttttcggccaaattcgagaagcagtatctaaagctgtagcaatatataaatcaccatcggtagcactattatattcactaatccagtgatggtgtcgataatattgtttccattgcatcaagctaaccctttgcgtatgtttgtcgtcaacataatcttgatgagctaagtaataatttaatagcttatcaaagtcagcttctttagcccagcctaacttggcagctttagtagtaataatcaagccaaaaccttgcgcttcagataaggctattggattttttctagatcctgcattaacaaaggtctgattatgacccttattgactaaatattcctttttccattcttggtaagtttttagctggacttgtttaggattattaattctaattaagaaaaagacggcaatatagccgaaaactattagcagaaaaaatactccaataagtttattcttcatcatattcctccacttaattgttaaagcgacgtgtcttaacccagacagttttatttcgatggaataagctgtctaaagtaacagaaattacggcatgaactgaaacaataataaataactgggaataggtgaaataagatgcaagtcctaaccagatttgactagtagtagcctggccatattgcgtagccattgcggttgtgatttgaagtaagtaaaggataatcatgaataaccaatttaatagtagtaattgggtgattaaaatattactttcaccgaaggtaaatggcatctgaattgcaggattaaacaggcgagctagccaagcaatcacattagatagaaaaattaagtctgacaaaataattgccgcattgaaccaaaagaaggtacatgcataataaaaagtttctaatttaacacgccaattagaacggtcaaataaatggatgaagttgccgattactacttgatagtttccctttgcccagcgtaaacgctgaaagtaatagtcacgtaagcgttcaggctcttgttgaaaagcttcagaattataggctagtgcaattaatttaccagattgcataattttaaatgaaatatcagtatcttcagttaatgcgccattacgccagccaccaatttctttaacaaaatcacgttggataatgaaattggtcccaggaattcggccgattttaaacatgtgccatataccacagtgctgaattcgttgagtaacaacaatttcctgatttatacagcgagttaagaaattttgagctgcatttctagttttatttcgtccaaagacggcaacatatttatctggattttcaagtaccttttttactaaaaaatatagtgcgtttttttctggtatcgcatcagcatcataaattgctaaatattctccatgagcgatttttaaggcatcatttaaaacaccagctttaccaccatttccagttctttcgataactttaatatgtgcaggcttattattagaatctgaatttgcaattactctctgcataatttgggcagtttgatcggtacaattatctgcatataataaaagctctattttttcattaggatagtttaaattaagcaaggctttagtagtttgagcaataactaattcttcattatgggcagggacaattatgctaattgttggatatctagaaagcttagtaacttttatcagtattttagaatacttaagccaaaaactacaagccccaataagtgtaacaatggtcataatagctgatagccagattgaaattaaagttgtagatagaaaaaatttacttatcatagttgctctccttggtgtttttagttcgatataagaaagattgttctattcgaaaataaataagccaataacaaaccgttaaaagtaaaattgctattgcaaataccagcgtgattgcaactgctaaatcaaagaagaggttaatcacatgattcaactccttttaagtattcaattactaaatcagtttccatctcacgagttaagtaacgtaaggcgtcatttaattccatgtagtcatagacattcttgcggttaatatgtaggctagcccacttatactgaggtagagcttgaaatgaggaaagcttttttagggaggcttgggtttgagcatttttgtaagttagcgtttcttgatctaaagcgtaggaaattattaagaatgtttcgttacctaggtaataaatctgttcagatgggaagcgtaaatcttttagaattttagaaattgaatgtaaggtttctttatattcttcttcatgaaattgcctaaattgcttgctatgtacccattgaatcatgttaagatcaattcttaatttagctttttcttcattaataatgaaacgtacttctttgtgatataagtgcgtagcatcgtatttggatttgagtttaactactggattgtaatgtgcaatataattgttgatatcagtgcgattacggtcaatccagccccaagcaccaattatttgttttgcaagagcagttaaggaagctattattggaaacgttgataacagtaatagtttttgaaaagtgggcataacaacatatcctagtagtaggctagcagagccaattgttgttaagaatatgattagccaagttaatgcaatctggggaataatgcaaccagctaaaacacctaaactgataattactgttatagaattaaaaattaaagaggatgtttgaccagctagccacattaggaggacacatgccaaaataataaatgatagcgtcaataatccccaatcaactaaatgtcgacgaaacataagtattctccttttgttttagtcagtaaaattaactgattttatgtaacatagagttaattaactaccgtatgaaatataacatatatctacgccttaaatagttaataaaatatgaaaattcgcctaatatatatatatatatatcgtatagcaaatacatataaaaaataattttatttgattgaataaatgtaataataattaaataactgaaaaaataagagtgctaattctccaaaatatatcatggcaaatccttggcattaaaggaattaaaagaaaacgctttttgataaaaaaagactatattatcattttattaaaaaaagcgattgttctaatttgaaaaatatttttttatattttattatcgattatgaaagacgttacaactgtcttaattagggggatattatatgttttcaaaaaataatatgaaaatgcgcatgcaaaaggttgctgataaagagcaacaacattttgctttgcgtaaattaaatgttgggttggtatccgttttaatgggtactacattatttttcgtgggacaaacatcaatagctaaggctgatacactagaatctactaagactagtgtcactgaaattagttctagctctaattctaatcaagaaaagttagaacaagctaaggctgtaagttctcaagagcaaactacaagtactgaagaaaatgtagattcagcttcatcaagtcaatcaaaaagtgaaaacaattctagctctagtgcgaagtcagaagtaagtactcaagatagaactgatagcaatgacaatgctactactaatcaagtagatactacgcaagtatctactacttcattgaaagctgttcaatcttctaatcaagctgctaacttattagctgaaagcaaagttgaagattcaacaacagctaatgttagtgatttcgattcatttaactcagctttgatgaatcaaaatattactactattaacattaatagtgactttacaagtggtaactatggtacaaatgttgaacaccgtagagttgttcctcgtactttagtaattaatggtaatggtcatacagttgaccttggttcaattggttacttcatgaatccaggtggtaatcaagcagctgattggacagtagaaaatggtactttctattctaagagtgctgttggtccatttgctcttactggtgatcacggtactgataaggcttggcaggcaaccaatggtgcagtacaccgtatgacttacaaggatatgacagtttatgctggtggtggtgcttatgctgcaaatgctgaaattgatttagaaggtactaacaatttaaacgctaccgcttcatatcaatctaagttctcaaatggtactgtttatactgaaactggtggtaacagatcaggtgttgaaggtcaatggattattattaaggataatgctaatgtgactgttaacactgatcacggtcaagctatttcaactgaatactctgatggaaatcacagaattgaagttggtgaaaatgccactttaaatggtaactatttatataccacttacggtactccttatggtggtggtaagatagctgttctttcaaacggtgcaaatggtggtactgtaatcttccataagggttctaagtcacactttactatgccaaatcaaaatgtaactggctttggtggtaatggttttagtaactatggtactggttctgttctttacttaggtgcagctaatactactattgaaaaaggtgcagaagttacaattgataaccctaaagaagctaataacgataacagtatcttcattcgttcagacggaacacaattaaatatctttggtaacttaattatcaatgatggtgcgcgtgactatactattcgtgccgataaccgtgtaagcatcaatgtgggtcaaagtattgcagatgatgattacagtaatgataatggtaaattaattattaatcgtaacggtgacttctacttgaataacgatggtggtgctctctcaatgtggggaccaattaccattaatgttaattcaggagctgctttagaagtttactcaactggaattaataatgtatctggttctggtgcaaatcctgctttaatgagagttggtggaagcagtaaattaaacgtttataaacgtggtactttcattttaagtgatagtagtaatggtaaagttagtctagttgatgattacaatgcaaatggtaacttcaacttcgacaatactgcaaaagttatttttgatatttcaaacaacaataaccaaaatagtagaatttttgctttaaatggtactgtatatgcaactcatgacaaggtaagagctatgctcacaccaagttctaatattgctgatatgggtacctttaagacggttcaatttaatactagtggtcaaggcggtgtgactggggatgcattacactctgagtatcaaaaccaagcctacaataacattgttgcgattagagatgcgattagaactggtcaattacgttaccttgaattctcaactcgttcagtaaataatgcaagtattactggtgaaggacatggctttactgataatggtgcacaaattaagggttcagtagttgatgaatcaactaacactggtgcggtagccgttgcctacgacaaagataataataaagttggttcaggtaatgttgatgaccaaggtaactttacaattaacttagataagccgcttcttaacaaagaagaagttaaagttagaattgaaacccctcgtggtgctagtggttttgtttcaactaccgctcctttaggtccaactgctaagagtccaattactgttgctaaagatgataatttagcaggtcaagatgctagccaatacatcaccaataaagatgaaattgcaaacattaagccaggtactactgactatgaaccaacctttaagagtgcagcttggaagagtgttgatactaataccaagaagggtattattactgtaacttatgcagataacactactactgacttagacgtagacttaaatgtagtagacaagattactgatgctgacaagttcactccagaaggtggaacaattaaagttgataatggtcataaattagatggtaatgatgcttatgaagcaatcaagaaccacgatgatttaccagcagataaagcaggctacaactgggttgtagatgaaaatcatccagccgttgatactactaagcctggtgatcaaactggctatgttcaagtaacttacaatgatggcagtaaatcagatttagttcctgttactgttcatgtaattgctgataatgaaaaatacactgctattggtaagactcaaaacctccaaaaaggccaaagtgcaaatcctcaagactttatcgctaataaagatggagaagttagccaagatggcaagacctatactaagttgcctgatggtactaaatatgaatgggtagatggaggaattgatacttctactattggtccaaaacaagctcaagttaaggtaacttatccagatggaaccactcaaattgttccagtaaaggctaacgtatattctgatgctaacttatcaactgttgttggtaaggatattaatgccggatacaaagaagacttgactaaccgtgcaattgatgcaattgataaggataagtcaactaaccttccaactgatccatcagcttatacttgggtaaatggcgcacctgatacatcaaagacaggtgatattccagcgactgtaaaggtaacgtatccagatggttcatacaatactgttgatgtaactgttcatgttactagtgatgctgaaaagtattcaccagttccagagaccatttctgttccaaagggtactgacttatcaggtcgagcaaaagatggtattgctaatgctgataaagatgctaatggtaaggaaaagttaccagatggtacaaaatatgaatgggacggcggagttccaaatacttcagtaactaataataagtatggtcatgtaaaggtaacgtatccagatggtagttctacagtagttgaagtacctttaaatattaccgataataataagtcagatgctgaaaagcataatccacaagctaatatccttcatgcaacattgaatcaagatcttagttcaaatgattgggctaaaaaaggcattttaaatgctgatgagcaagatggagcaacatttagatggagaaagggttatgttcctgatacttctaaagaaggccaagtttggggtattgttgtagtaagctatccagattcatcaattaatgaagttcgagttccagttatcgtccaaagtgatgcaagtaaatacggtattgaaactcaagaaatcaatgttcatgaaggaaccgatattagttcagatgaatgggctagaaaaggtattttgaatgccgatcaagctggaaaacagaatgaacaattaccagatggaactagctacacttgggcaaatggtaatgttccagatactacaaagccaaataagaagacaggttatgtaactgtaactttcccagataatagtagcagaactgttccagtaatcgttaatgtaattgatgatggtagaagtgatgctgaaaagtatcaacttaaggctcatgatatttggacttatataaacgatactcctgttgcagaaaaggcagtttcaaatcttgacgaactaaaagatgttagttcaattacttgggcaactacaccagatgtttctaaggttggtaacgttccagcgattgtagttgtaacttataaagatggtacttctaatgctgctcctattaacattgaggttaagggattagcaaatgattataagcctgaaggtacaactatttatgcaggtttaaatgaagatataactaacagagctgcagatggtattgctaataaagatcaaatgccagtagcaaataaaccagaaggtactgttcacacaacttattcatggaaggataatataattcctgatactactaaacctggtaccaagtatggaattgtagaagttaacttcccagatggttcaactaaggatgttccagttgaagttaaggtaactagtctagcatctgattaccaaaataagattgatactaagcaaattattgctaagtacaagggtaatatacctcaagcctctgacggtattgctaacaaagatcaagcaactaaagaaggagacaaagacttcccaagtttagctgatgtgttagctcctaatggtattcaatggaagaagaactttgaacccgatttgagtaagccaggcttaacaagtggtgaagcaattcttacctttaaggatggttcaactgccgaagttacaattccggtattagttcaaactgatgctgatcgcaatactccagaaactcagactattaagacacttcctggacaaacagtaaatcctgaaaatggtgtaattaatttacataagcctggtgaaaataacccacaattgccagatggaacgaaggtaacttttgataatcaatcagatgttgatgactttactaagcatggaatgccaggttctgataagagcttcgatgctactgtaacttatccagatggaacaactgacaagattaagttgccggtacacattacagctgataatgaagttaatactccaattactcaaggtattattacacctaaggatagtgtgccagatgccaataaaggtattgctaacttaaagaaggctactaccaaagaaggtaaaacttatcctgcattgccagagaacaccacggttgaatgggttaaccctggtcaaatgaagactgagcttgaaaatgcaaagggtggtacaaccaagaattacgatgctgtagtaatttatccagataaatcaactgaaattgtttcaattccagtaactgttgctactgatgcagatacttataaagtagtaacacaaccaatcgatttgaaggatagaaacttacctgacaacgctgatgatggaattactaaccttcataaaccagcagactttaagactccacaattgccagatggtacacatgcagaatggcaagataaggatgctgctcaagaagtagttaagaacttgaagccaggtgaaactgtaaaacttccagctactgttgtcttcccagatggttccaagaagggtgaaggcattgatgtaagtgttcacttacatggtcaatctgatgattataatattgaaacacaaccagtaaatactgataaagatggtaatttacctgaaaatgctgactctggtattaagaacttaggaaagttacctgaaggaactcacgcaagctggggtgatggtgcccaagatattgccaagaatttgaagccaggtgaaactaaggatgtaccagcaacagttgtcttcccagatggctcaaagaaggaaattacaattccagttcatagagaaggtcaatctgatggttatgatgttgaaccacaactagtaaatactgataaaaatggacaactacctaatgcaaaggaaggtattaagaacttagccgatttaccagaaggaacaaatccaacctgggcagatagagctcaagataaaattaataagactaagcctggtacagatacaactgctcaagtagttgtaaccttcccagatggttcaactaaggaagttactgtcccagttcataagcatggtcaatctgatgattatggtgataagattgtgactcaaagagtagaaactgatagtcatggtcaattaccagaaaatgctgattcaggtattaagaatttaggagatttaccagaaggaactcatgcagtttggggtcaaggagctcaaactattgtagatggtatgaagccaggtgaaactaaggatgtaccagctactattgaattcccagatggttcaactaaagatgtaactattcctgtttataagacttcaacaagagaccaaggaacattaaacccaccaacagataaagtaccagtagatgataccaagcacatcacagatgaagacaagggtaaggtaattgacaacgttaagaagtcaaacccagataaggacattactgatgctcatgtagatgatgacggtaccttccacggtaaggttgatggacaagatgtagtggttccaggaacagaaacagttgttgaaaagcaaaaagaaagcttgaacccaccaacagataaagtaccggtagatgataccaagcacatcacagatgaagacaagggtaaggtaattgacaacgttaagaagtcaaacccagataaggacattactgatgctcatgtagatgatgacggtaccttccacggtaaggttgatggacaagacgtagtaattccaggaactgaaacagttgttgaaaagcaaaaagaaagcttgaacccaccaacagataaagtaccagtagatgataccaagcacatcacagatgaagacaagggtaaggtaattgacaacgttaagaagtcaaacccaggtaaggacattactgatgctcatgtagatgatgacggtaccttccacggtaaggttgatggacaagacgtagtaattccaggaacagaaacagttgttgaaaagcaaaaagaaagcttgaacccaccaacagataaagtaccagtagatgatactaagcacatcacagatgaagacaagggtaaggtaattgacaacgttaagaagtcaaacccagataaggacattactgatgctcatgtagatgatgacggtaccttccacggtaaggttgatggacaagatgtagtggttccaggaacagaaacagttgttgaaaagcaaaaagaaagcttgaacccaccaacagataaagtaccggtagatgataccaagcacatcacagatgaagacaagggtaaggtaattgacaacgttaagaagtcaaacccaggtaaggacattactgatgctcatgtagatgatgacggtaccttccacggtaaggttgatggacaagatgtagtaattccaggaatagaaacagtagtcgaaaaatcaactaataaccaaaagagtgatactaataaagggttaattagcaatgataattctgaaaagaatagtcatatgattaatgcaaatgtaaataccaagagcagaaatagtttatcagctaagcaaaatcgtttgccacaaactggttctgaaacttcaggtttatctgctttaggtctagcaatgctatccttagtaggcttaggcttcttgattaagaagagaaaagaagattaataattggttattgagaaaagacgctaagatatcttagcgtctttttttggctctttgtcaaatcctgttgataaagagtgatttaaagaatcaagcaatatataaattgcttggttctttttctttaactttgttttcttctaatctaattcttgttagtaagttaatgtaatttgagtatccataagcagtacgctcaatctgtttaatcttacgattgaaaccttctaaacaaccattagagtagctgaatctagcaccatttaagactgctcgtaagttatgcttaaaggtcaataaagtcttgtgcatcaaagtgccaacctcagctttagaattaattatttctttcaaagaattagtatctctagctttaagagcagccataaagtcttgcattaaattatacgcattatctagccttggatcacaactaataccttccattacaacttgttcttgagttagatagtctttgaagtgccaattataatgagggtgaatcttatctaaatcaacgaaagacttaagataaagcttccaaggtgatttgagcagttgatattgccttgctcgtttatcaaaagacttcatgactaaaactcttaaagaattaaaagagcgagttaacatctgtaccatatgaaaacgatcaatgataatttctgcattagggaaacaagctctaacaatattttgatagtaaaagtttaagtccatagaaacagttttgacgttagcacgagcactaggagagaatttaccaaagtatttaagtaaagactttttgtatcggtttctgaggatttgaaccacttcatgcttttgaccatcaagacaaataaagtgtagctttttatcgacgcctttaaattcatcaaaggctaagtgttcaggtaaatagttatagttatcaataaaacgatgagaacaagaagctaaaacgcgttaaacagtattaacagatagattattctcacgagcaatactagtcatagaacggtcctcagttaaagcagaaagaacctttcttttggcaggattagagatagaacaatatttattaactaacttagatttggccattgaacgagtattacaatctcggcagagaactctttgcttatttaacctgataatcacaggactactagcattagaagtaataaatctaatattagtctgaagatgaccattatgaatcagattaacagaaccgcaaaaaggacaagcaggctgaataagagtagcttgaaagaccttatacttaatatcgttaattaatttaaagaaatgagcattaaaagtgatattagggtcttggatatcgagcgaaaatttaatacaatcattgtaagaggacatagaaaaacctttaataactattaaaatttgagtcgtgttgaattttattgtaagtagaggggctatggcctctttttttgcaataaaaaacctgttaacagtttaactcaaataaactatcaacaggaaaaattatagaaccattaaaatcttgtcactaaatttaggtatttatccttatatagtaatatcagactggagggagttatgaacgaattatttgcaaaagtacctattagacaagtctattttaagttagcatttccagtcgttttaggtatgattacgacaatggtttataacttagctgatactatatttgttgctaaaacaggagatactaatttagttgctgcagtgactattagtacaccgttaattaactttttaattgcattttctgatatttggggacttggtggcagtagcgtgatttctcgtttatttggtgagaaaaaatatgaaaaagcaaagcgagtaagtagtttttcaatttatgctggaattattgttagctttattttgacaataatcttactagtctttgaaaaacaaattctatggctctttggtgctcgtacaagtacttatgctgatgcagcggaattttatcgggtatttgcaattggtgcagtttttatcatgtgttctttaattccgcagaatttactcagaagagaaggttaagcattagaagatatgattggctcaatctcagggactgtgtttgcgattatctttgatccaatctttttgtttgcttttaagctaggttcagctggagtagcaactgctaatttgattggtttcatcgtaacggataccgttttgttttattacatgattaaacgagcaaaatttattaatgctaagctgaaattcattaaagttgaacagcgcttatttaataaagtaattgcccaagctcagttaaccagtttgctaatacttttggtatggctctgcttaacagtactttggcagcttacggcgctaaagaagttgcagctatgggaattactcaaaagatttatagtattgtaattttggcaattgttggctttacttttgggtcgcaaccgctaattggctataactacggaactaagaactggaagcgattgagagaagcgttacattttgaaattttggttcaagtagtctatgcagtagtttcagcgctcattttaattatttttgctcatacaattgttggattattcatgaatgatgctgcaattgttaattcaggtagttatatgttatttgctactttgattactactcctttggctggagtaattatggtttatacgactgttttccagtcaattggtaatgcctggggagctttgattatgtcgcttgcacgtcagggcgttgtctattttgctgcgatgctgcttttagagcacattttaggtttatctgggcgcaagttgcatctgatgtaattacagtcatcatcggatatattatttttactaagagtttagatttaaaagataaattaggctaataaaaacggcacttcgtttgaagtgccgtttttgttataagttgttaattttatcgacccattcatgaggattatcaactgataaaaccaaacgattgtagttttcgtcttttagctgaataactatgatattctcaccttttttagcgttgtaaaagattgtatcgctgttgcttttgaatgtgccgacatagtagccaaaagctgcagtaccaggtaagcgtaacccttttttatcaaaaattattccattgtctagcgttgcaccgacaatatgatttaaagggatagttagtttatttttgagggtccaaaatttatctaaaccttggggtgcaactattaaatcggaattcttaattgttagtttgtttcgcatttatattacctcactttatattggctactgctagtaactgactacctaaaatttgttctaattcgttacttggaaaactctgacaccattcctgaataagggtgtggatttctttatctcttctgcttagttcgagcatcgctatgagcattaaatgtattgttttttcaccatccttaacttgatctaaattattctgtaaagctgctagaaacatgccacgtttactgccgaattcagaatatagacttcctcttaataaaccagttgctttgactaggtcatcaagtgaagctgcttcatagccatattgtaggaaaacagaagttatcgcccttatgacttctgttgagttaaatttctttttccatcccatactagtattatactttatttttgactgaatagtcaaaaataaacatgcaactgataggtgcagagaaagtgtgttaagtgctagcttgcaattagtaggtacgatagaatttaactggtatttttaacgaaggagaatagaatatgaataatctaaatgaaaggcttaagacattacgtgagagtagcaatttgtctcaagaagatgttgcaaataagctcaaaatatcacgccaatctatttcaaaatgggaacttggtgatgcggtacctgatataggtaagttaatggaactaagtaagatttataatgttagtttagactacttggttgggagagattcatcagaaaaagtaaaaaatacaaaagaagctctgcgtaaaaagcggaatgcatcacaaattattttgtggtcactttgtttagctattgtttgtctacttattatgtttttagaagatggtcgagcagcagtattattcttgtttgccacacctgtatctgcatggattcaatatcactatctacaagaattatcgaagttgccaaaataagtaaactagtggttatttcctgggaaatagtaaaagcaactgaaagtggcgtgaatgtataccataattggtggtgtgcaactgatgtgcgcaatataatttagatattaaatgacggaggaagaatcatggatcaaattaatgagcgtcttaaagagatgcgacttaatgctggtatgtcccaggaagaacttgctagcaaactaaatgtgtcacgtcaatcagtatctaaatgggaaactggtgattcattaccagacattctaaagttaaagcaattaagcaagctttatgatgtttctattgattatattgtaggcaatactgaatttgataggaaagaagatacgcaaaaaacaagtgaacaagctgtattaaaaaagcaaaaagctaagcgtgctttaaagggtgttttgtggggaacggcttgtatgcttgctgcatttggaatggaagttttaaagcaggatggttgggtgattgctatttttgctgctgtacctatgcattttttaattaactattatgttgataataaagaataaagaaactcaattttgagtttctttttctttgcgttataacattaagtagaaatgacttagataggagaaataatatgatctcaaagtcggacctaataaaagcaattgatttaagacacactgttcgtagatataagccagtagaaattgatcctaatgttcaaacgtttatttttagaaagaattgataaactgaacagtagccataatttgactatgaaggtagtatttgatgataattcatccttatcacttcttggtaaatttattttaagtcaaaatgctcaaaactttattgtgctagctggaagtgatagtcagcaagaaggattaggatattgtgcagccaacttgatgttatttttgcaaagtattggcttgaacagctggtttgtaggtggaacttataatcgcaaaagattagaaagtaaatatcatgaaaatgtctatggagtagttgtttttggatatggaatagatgatggaaagaatcataaaagtaaaagcttcactcaagttagtcagagtgataatgagaataactggtttaaacaaggagtagaagctgctttaaaagcaccaactgttcttaataagcaaaactttaaattctatttaactgatggagtggttaagttagaagttaaggaaagtccatatgcaaaattggagctaggaattttgtcttacttttttgaacttgcaagtggaatgaaaatagataattactatataaaatgaaaaaagcaagttatttaatatgtttcaaatttagagtgcatatcaaatacttgctttttataattaatcaattttacgtttaggatttaaaattcccattggatcaaagagattcttaatttggtgttgaatgatgtcaactgactcacctaattcaacatggttccatttattcttaagtaagcccacagcatgttctcctgaaatagttccttcaagttcgagggccttttcaaacattaacttgataacagttactacttctttaggtgtctcactaactgctgtactccaagtaatagttggatgtaagttaccttctccagcatgtcctgaagtaaaaatctccaaatcatatttctggctcaattcttgaatataatcaaccaattctgccatttttgaagtaggtacagccatgtcttccataacggcgtttctacctgtaaaaatagctggaagcattgcttgtcgtaactcgataatttgcttttgttttgtttcatcagtagtcaaagtgacttcggaagctgagaatttagctaaggtatttttgagaatatcaattttttctttagttataccatcaattttgaaaattagagcagcattaccattatttgaatagttggtattcttaaacttatcaattgctttaagagtattgatatcaagtgcttcaagcataactggatctgaaccggaacggcgaatagcactagtagccgttgataaagtagtcatatctgggaagaatgctagtcccattgcactttctccaagtggtaatggtaagagcttaacagtagcttcaacaataatacctaatgtaccttctgagcctatgaaaagatgtgttaggtcatagccaaatgcttgtttagtagttttaccacctacattgataatgtcaccatttgctaaaacaactttaagacctaatacattgtcacgagtagagccatatttgacaccacttaagccaccagcgtttgttgcaatattaccaccaattccggaatatggtcgtgaagcaggatctggtgcgtagaaatatccttcttttcttgcggcagcatcaaggtctccattgacaacgccaggttgtactactgcatatccgtcaattgtattcagttcaataattttattcaactttgcagtagataaaattagggcattatcacttgcatcagctccaattacagtactggtaaatttattttgagttattactggtaagtgatatttgcgcgcaattgctaaggcgttttgtatatcggcagttgaatgtgcctcaatgaaagcaagagctaagccatgttggccagctagattgtcactgaatgattgcttttttaatgtttcttcatctgtaaataagctatcgttattaattttgcttcttaaatctgataagatttcttcttttgtaagtataagattattatacattccacttacaaaaagtaaataagaaacttgctttttgtaagtatttttttacttatcaatgaaaaaatactattgtaataaataaatggattaaatttaaaggactgaaattaagattaatgattgaaaaatcaaattttcccccaaaaaatattgaagttcgaggggcaagcatcaataatttgaaaaatattgatattgatattcccttgcacaagtttgtcgctattactggtccttctggtgctggtaaaagttcacttgcaatggggattctttatgcggaaggttcaagacgctatctagaagccttatcaacttatactcgcagacgaatttcgcaagctaaagaaactggtgttagagaagtgcgtcatattccttcagctattgctttaaggcaaagaccaactgttccaagtgaacgttcaactgtcgggtcgatgaatgagattcttagtgtaattcgcttaatcttttcacgtctagctagtccagtttgtcctaatgggcataaaattgccccaagcttggcaattgctaaggcaatggatgcgcccggagataagatgggggaaattacctgtcctacttgtcaggtagaatttatggcaaaatctgcagaagactttgcctataattcaggtggtgcctgccccaagtgtcatggaactggtaaagtgcaaactttagatccaactaaaattatccccgatgacaacaaaacgattaatgaaggtgcagttgcttcttggcgtttacctggccgcaactttatgaatactattgccgcaactttaggtgtgcgattagatgtaccatttaaggatttgaccaataaagaaaaagatattgttttacacggtgaaaagaaaaaatacgcagttgattttcacacttcaactgggcgagtctatagcaccgatggaacgctatatgagaatgcatatgaagcggtttatgcatccttaaagactgctaagacagaacgcagtttgactagaatcaataagttttttaagttctcaacttgtccgctttgtcacggcaatcgtctaaatcctgaattactaaagcaaatcgttgcgggaatgaatatagctgaagtttctaatttaactttggctgagttagttcattttgaatgtaagactataaattggttacctgaagaaatgaaaggtatagctaaagctatcttcaaagacttagaggataacttaactccgttacttgatttggggttagactatttaaccttagctcgaaacggtaatacgttatcaacgggagaactacaaagaattcaattagctcgaactttgcgaacagaaacaactggcgttttgtatgtattagatgaaccaacaattggacttcatccagacaatgtctcaggtttattaaaaatcttccgtaagttaattgaccagggaaattcattagtagttgttgatcatgaagtcagtgtgattgaagctgctgattgggtgattgaaatcggtccagaagctggggaaatgggtgggcgcattgttgcagaaggaagaccagaagatttagaaaacaatcctaagtcaatgatagggaaatatttatccggtactgccaaaattactagcctaaaaaagcaagatatatctctagcgcaatcaacgcaattaagggtaaaggactacttcaacttgcatgatgttgaagtcgcaattccagatgagaagttaacagccgtaactggcttttcaggtgcgggtaaaactagtctaattttagacagtttagtgccagctattaaaaatccccacgctttaccagcgcaagtaacgaagttaacgacttctatcaagtcggttataagtgttgatgctaagccagttggaaagaacacgcgctcatgtgttgctacctatacttcaatcatggataatttgcggcatttatttgctaacttacttgaagcaaaagaacaaaagctgaagatatctgcattttcatataataataaacaaggagcttgtccaacctgccaggggctaggcaagatttcacttgatttgcagtatctacctgatatggaacaagtttgcccaacttgtcagggacagcggtttgcaccagatattttaaagataaaatggcataattattcaattgctgagcttttgaatctttcggtgaatgaagcaattcctgttttttctcatgaaagtaaaattttacgtgaattaactttattgcaagaagttggattaggttatttgcacttaggagagagcaccccagaattgtctggtggtgaagctcagcgtttgaaactaattaagcatctgcaaaagtcctgcaagcatactttatttgtgtttgacgaaccaacaattggacttcatccaagtgatattcaagttttgcttaaagttttacgccgcttgcagaaaaaaggtgcaacaattgtcatcattactcatgatttagatattatgactaattgtgattatttaattgacctaggtcctaaaggcggaagtaatggtggacaagtaatggcaactggtaatccttttgccttagttaaaagtaataattcaagtttaactctgcagtatttacgccagcatttattgaaatatcatctggtttaaggaataatattataaaataataactctacttgctataattttagtaagtagagtttttttgatgggaggcgaatggaaatggtaaataagttaccaaaagaaataaagaaagcttggttagtgaagaatattcttgatgctttgggaacaatcgttggctttggaattatctattttgtcttaaaaatttttgttgataaaaactggctacaccttactttaatagtctggacagtattgtttgccttagttatcttatttgacttgattcaaattcttctaattccgtatatctataatttttggacttaccaaataactggtgaatttgtggaattgcacaaggggtatatttttagaaaacaaattaccattccacttgcgcgtctgcagacagttaccctggaagcagggccaatcttacgctggcagaatttgacagagttatatttgcatactgcttcttcaagtgaaaagatttcgggcttaaggctagaagatgctaagaagtttagaaagcagcttttaactattattcaaaaagcaggtgatacacatgaataagcatttatcaccactagctcttttgtttttcttaaaagatcaagtcagtagtaaaattggtcttctgcctgctattcttgttgtttgtgactatctaaatttcttaaaagggcaatattttattcaaattagctgctttgtagttctagttttattagcagcttttgttgaatattttagttttacttatgaatttttagataatgaattggtaattcgttctggtttatttaaaaagaaggaaaaacatatcccttattcaagaatccaaacaattcataccaatcatcctttttggatagagccgttaaaattaactaaagttatcttggaaacagctaatcaagatgatgatggaatagtagttttacgagttattagtcaggcagagcttgaacgcttacaagcaacaatgcaagtggcggaatcggcagttgaagatgaagtaaaaggctacttgattaatagtcgtgatttagcaatttatactttaacttcgcctggaattattgctgggattgtgctggttttggggttttatgggaagctaagtgattttaatattaaaattgattttagctggccattattgctgcttgttttactagtagggattgttctttcttttttagctacttggcaacgttattacaactttaacatctataatgaacaaaatcagttaaaggcaaagagtggtctttttactaaaacacaaatgactttgcctgttaagagaattcagggaatcatttttgaagctacttattttaggttcttgactaagttagttagtattcaagcaattgcctcttcaaaggtaactggtgaagaagaaggcaatattaatctgattcctgtagttgaagctaagtatgctgcagatgctttacatgagttacttcctacttggccaagtgtaattaagaaacttattccattagctaaaagtggaaagcgagctttatttgtttatcgatttaactgctggttttggattagtttagtagttaatttgctagcttatttatatcttgggcaagcctttatttgggttgctattttaagtctggtaatcggtttgtatattttatttactagcataattattggtaagactagtggagttagctttgatgataaatatttatatcttggaactaaacgctattttaaaattatcaaagcaatattaccgagagacaagattcaatatttgaagctaagtcaaagtgtttggatgaagcggaaaaagttaatgcatatagaacttgaagtaatggataaaaactatggctaccaaatccgagtccgttatttgccagagcaagttgctaagaatgtacaaaaatggtttatggaaaaataaagtagataatgctaaaattaacttgttagttttttatttaggagggcttggctcgtgaaatatgcagaaaaagatccacaactttgggatgcaatcgacaaagaagaagacagacaacaacatacaattgaattaattgcttcagaaaatattgtttcaaaagcagttgaagaagcacaaggttcagttttaactaataagtatgctgaagggtatcctggcaagcgttactatggtggttgccaatatattgatgttgcagaacaattagcaattgatcatgcaaaagagttattcggtgcagcttatgccaacgtacaacctcactcaggctctcaagctaatgcggcagtttatcaagcattacttaagctaggtgacaagattttgggcatgggaatggatgccggcggacacttaactcacggtgccaaggttaacttctcaggtaaaatgtaccaaacttatgcttatggcttaaatcctgaaacagaagaacttgattatgatgcaatccgtaagcaagcactagaaattaaaccacaaattattgtggccggagcttctgcatatagtcagattattgactgggataagttcagagcaattgctgatgaagtgggagcttacttaatggttgatatggctcatattgctggacttgttgcaactggttatcatccaaatcctgtgccagttgctgacgttgtaactacaactacccacaagactttaagaggtcctcgtggagggatgattttatctcgctctgaagagttaggtaaaaagtttaattcagctgttttccctggttctcaaggtggcccacttgaacacgttattgctgctaaggcccaagcattttatgaagatttgcaaccacaatacaagacttatattggtcaagtagttaaaaatgctaaggcaatggccgctgtcttaaatgcttctgacacaattagagttgtaactggtggaacagctaaccacttattagttttagatattaccaagactggcttaactggaaaagatgctcaaaacttacttgatagtgtcatgattactactaataaagaagccattccaaatgatccacgttcaccatttattactagtggtttaagaattggaactccggcaattactagtcgcggatttgatgaagaagatagtagagaagtagcccaacttattattgaaactctaaataatagcaatgaccaagcagttctttccaaagtagccgatagcgtacaaaaactggttgctaaacatccagttgaataaacaaaaaaggattcctaatggaatcctttttttaatatgatttttttctttagagctacgatagcaattggaacaactgataccaaaatgattgctattacaattagtgaaaagtgtgtctttacaattggcaagttaccaaagaagtaaccaattattgaaaataaccctgtccacaaaataccacctaagatattatatgttatgaaatggccgtaatgcattttactaccaccagaaataaatgggacaaaagttctaataaatgggataaagcgtcctattacaatcgtaagcgatccatgtcgttcaaaaaatttctccgcggcatatcgattcttttcatttattagcttattaaaccaagcatgcttagatccagctctggttgaccaagctccaacttcatagttaacgctatctcctaaaatagcagcaattactactgctaagtatacaagccagatatctagtccatatttagtatttgcagccattgcacttgctgcaaatattaatgaatcacctggtaaaaatgggaaaacaaccaatcctgtttcaataaaaatgattgcaaataaaattaaataagtataattgccaaattgattgacgatatttactaagtgatcgtcaatatgcaaaataaatgaaattaaccccatagttaatcctttctagaataaatactgtcatcttttaaagatgtttgagtatgagctaaacgactggcagcagctgcagcaacggctccaaccaaatcatcaagaaaaacattgattttgccagttgatttatcatttaaccattttaaaataccaggctttgttttatcaatatagccataattagtaaaaccgattgaaccgtaaagattagtaattgaaaaagttaaaacttcatcacaaccatataaaggttcatcattttccataattgattgtaaaggttcagaaagttgcttcttttcagcaagcttatctaattcaattccggtaattattgaattttgaacttctcttttttgaagaactttagtaatactttcttgcattgcttcgtgagtaagaggatggatataatctttttgcaaataataaactaagtcctcaatatcttttagcgtaacaccacgttcgttcaataattcaattgtatgttggtaaaagtgttctgtcattatctgtcacctaaatacttgtagaatggatagtcagctgcttatcaggaaagattgtttgcataattgaagtaatagcaatttgcgcttcaccgaagccgattccgataattggaacgcgaccttcgtagcctacactgtcgcctgctgcaaaaattcccttgactgaagtttccatctttcgatctactttaattaagtcattttctaactcaataccccatttttttataaaacggttattagctcgaaaaccatatgcaactattagattatcaaaaataaatgaatttgtttcatctgtgccaactttcttaagagataattcacatcttccagaattttcagttaagtcagcaggtaagtatggggtcaaaacagaaactttaggattttttttaaccttttcaacattactttcaagccctctaaattgattacggcgatgtattaatgaaacttttgcatattgacttagttctagtgcccaatcaagtgcggaatcaccaccaccgagtacggcgacttgtttatcctgatagtcttgtggattttttacaaagtaagaaatcttactttcaatattatctggaactgcaagaggaaaagctttcggcttaaaagcaccattacctgttgttataaggatagttttagagattaaatcatcattgataataaaatgagaattatcaaaaataatattttctaccttataattacgatagatgtcagtgtcgtcactcaaatttgaacaaagcttttcggttaattcaaatgacttgatatctctaaatacagggatatcctgtataactttattaggatagagggcagctggctggccacccaattctggtagagattcaagtagagcaactttaagcccgtgtaaatgagcaaaataagcagaaaataatccaactggaccagcgccaactattgctaaatcatactctttgataataattcctccttaatacggttgtttcattagaaactctaccatgaatagaatatttttgcaccgaaaaaaacacttgccaaaaagaaaataatcctgtatcttagataaagtcgtgttaaggcaaagcattgatgacaaaaatatttcaaaaaagaataaaaaagttcttgtaattttgaaataaatcaagtaatataattacttgtcgcgagtcgatgagacagcgaaaaaataaattcaaaaaagttcttgaccgaaaggttaagagatggtaatatattaaattgtcgtgagtcagagatgacgagcgaggataaataaattaccaagtatcagaaaaaagttcttgacaaaagcaacttgcttctgatataataacaaaggtcacttgagtggccggagttagtactttgaaaaccgaacaaagtttcgctaaagtgtgcgggtgtaacaacccaaacaaaagcgaagtcaattcgttaagcaataaatttgagataacaaatcaaaaaatctgattgagctaagagctcattttaattcaaaatgagagtttgatcctggctcaggacgaacgctggcggcgtgcctaatacatgcaagtcgagcgagcttgcctatagaaattcttcggaatggacatagatacaagctagcggcggatgggtgagtaacgcgtgggtaacctgcccttaagtctgggataccatttggaaacagatgctaataccggataaaagctactttcgcatgaaagaagtttaaaaggcggcgtaagctgtcgctaaaggatggacctgcgatgcattagctagttggtaaggtaacggcttaccaaggcgatgatgcatagccgagttgagagactgatcggccacattgggactgagacacggcccaaactcctacgggaggcagcagtagggaatcttccacaatggacgaaagtctgatggagcaacgccgcgtgagtgaagaaggttttcggatcgtaaagctctgttgttggtgaagaaggatagaggtagtaactggcctttatttgacggtaatcaaccagaaagtcacggctaactacgtgccagcagccgcggtaatacgtaggtggcaagcgttgtccggatttattgggcgtaaagcgagcgcaggcggattgataagtctgatgtgaaagccttcggctcaaccgaagaactgcatcagaaactgtcaatcttgagtgcagaagaggagagtggaactccatgtgtagcggtggaatgcgtagatatatggaagaacaccagtggcgaaggcggctctctggtctgtaactgacgctgaggctcgaaagcatgggtagcgaacaggattagataccctggtagtccatgccgtaaacgatgagtgctaagtgttgggaggtttccgcctctcagtgctgcagctaacgcattaagcactccgcctggggagtacgaccgcaaggttgaaactcaaaggaattgacgggggcccgcacaagcggtggagcatgtggtttaattcgaagcaacgcgaagaaccttaccaggtcttgacatcctttgaccacctaagagattaggttttcccttcggggacaaagagacaggtggtgcatggctgtcgtcagctcgtgtcgtgagatgttgggttaagtcccgcaacgagcgcaacccttgttaatagttgccagcattaagttgggcactctattgagactgccggtgacaaaccggaggaaggtggggatgacgtcaagtcatcatgccccttatgacctgggctacacacgtgctacaatgggcagtacaacgagaagcgaacctgtgaaggcaagcgaatctcttaaagctgttctcagttcggactgtaggctgcaactcgcctacacgaagctggaatcgctagtaatcgcggatcagcacgccgcggtgaatacgttcccgggccttgtacacaccgcccgtcacaccatgagagtttgtaacacccaaagtcggtgaggtaacctttggagccagccgcctaaggtgggacagatgattagggtgaagtcgtaacaaggtagccgtaggagaacctgcggctggatcacctcctttctaaggaagcaaggtgctggagagtagagatactaaaagaaggcactgagtacggaagcacactaaagaaactttgtttagttttgagagtagtaactctcaagaacttgaataaaaaccaagcaaaaagtcgggcctatagctcagctggttagagcgcacgcctgataagcgtgaggtcgatggttcaagtccatttaggcccattgaagcaaaagcttcaagggaaaagacgaataattgggggcttagctcagatgggagagcgcctgctttgcacgcaggaggtcatcggttcgatcccgttagcctccatcggacaccataaggtgtccatgagaattgcacgttgaaaactgaataacaaccaagaaaaaccgagacaatcattgaacagattgtgaaagcgaaccgagaagagagatctaggtaataggtcaagaagagaagggcgcacggtgaatgcctgggcactagaagccgatgaaggacgtgacgaaccacgaaaggctacggagagctgtaagtaagctaagacccgtagatatccgaatgggggaacccggtgcagcgatgcatcattaaatactgttaaggtatttaaaggaagacgcagtgaactgaaacatctaagtagctgcaggaagagaaagaaaaatcgatttcctaagtagcggcgagcgaaagggaaagagcccaaaccattgaatttattcagtggggttgtaggactacgatgtgagacagagaggtatagttgaagtctttgggaaaagacgccagagagggtgagagccccgtaagcgaaatagctcgaagctctagtagtatcctgagtaggccgggacacgaggaatcccggttgaagcagcgaggaccatctcgcaaggctaaatactaactagtgaccgatagtgaaccagtaccgtgagggaaaggtgaaaagaaccccggaaggggagtgaaagagaacctgaaaccgtgtgcctacaagtagtcaaagcacattaaagtgtaatggcgtgccttttgtagaatgaaccggcgagttacgttaagtagcgaggttaagacagaaaagtcggagccgaagcgaaagcgagtctgaatagggcgagcagttacttgacgtagacccgaaaccaagtgacctacccatgtccaggttgaaggctaggtaaaactggctggaggaccgaacccacgtaagttaaaaattgcggggatgaggtgtgggtagcggtgaaattccaaacgaacttggagatagctggttctctccgaaatagctttagggctagcctcgcgagagaggataatggaggtagagcactgtttggactaggggcccgtcaggggttactgaatccagataaactccgaattccatatatctatacgcgggagtcagactgcgagtgataagatccgtagtcgaaagggaaacagcccagatcaccagttaaggtccccaaatctatgctaagtggaaaaggatgtggagttgcgtagacaactaggacgttggcttagaagcagccatcattcaaagagtgcgtaatagctcactagtcgagtggcgctgcgccgaaaatttaccggggctaagcatagtaccgaaactgtggatgtgcgtaagcacgtggtaggagagcgttctaattgcggcgaagcctaatcgagaggataggtggagcgattagaagtgagaatgccggtatgagtagcgaaagataggtgagaatcctatccgccgaaagactaaggtttcctggggcaggctcgtccgcccagggtaagtcgggacctaaggtaaggccgagaggcgtagccgatggacaacaggttgagattcctgtactaatattaatcgttaagagcaatggagggacgcagtaggctaatggcgcatgtaactggaatcatgtgtaagcgtcaaggcttgaagtgagtcaaatgcttgcttctaaaaggctgaggcgtgatgcggagcgaaataaagtagcgaaggtcatgatgtcacactgccgagaaaagcttctagccagagagatattacccgtaccgcaaaccgacacaggtagtcgaggagagaatcctcaggtgagcgagagaactctcgttaaggaactcggcaaaatgaccccgtaacttcgggagaaggggtgctgatctccggatcagccgcagtgaataggcccaaacaactgtttatcaaaaacacaggtatctgcaaaatcgtaagatgacgtataggtgctgacacctgcccggtgctggaaggttaagaggagagcttagcgcaagcgaaggtttgaattgaagccccagtaaacggcggccgtaactataacggtcctaaggtagcgaaattccttgtcgggtaagttccgacctgcacgaaaggtgtaatgatttgggcactgtctcaacgagagactcggtgaaattataatacccgtgaagatgcgggttacccgcgacaggacggaaagaccccatggagctttactgtagcttgatattgagtatctgttaaacatgtacaggataggtaggagccagagaaagtaggacgctagtcttactggaggcgctgttgggatactacccttgtttgatggatgctctaacctaggccgctaagcgtggtcagggacagtgtcaggtgggcagtttgactggggcggtcgcctcctaaagtgtaacggaggcgcccaaaggttccctcagaatggttggaaatcattcgcagagtgtaaaggtataagggagcttgactgcgagacctacaagtcgagcagggacgaaagtcgggcttagtgatctggtggtaccgtatggaagggccatcactcaacggataaaagctaccctggggataacaggcttatctcccccaagagttcacatcgacggggaggtttggcacctcgatgtcggctcgtcgcatcctggggctgaagtcggtcccaagggttgggctgttcgcccattaaagcggcacgcgagctgggttcagaacgtcgtgagacagttcggtccctatccgtcgtgggcgtaggaaatttgagaggagctgtccttagtacgagaggaccgggatggacataccgctggtgtaccagttgttctgccaagggcatcgctgggtagctatgtatggacgggataagcgctgaaagcatctaagtgcgaagcccccctcgagatgagatttcctttgcgaaagcaataagacacctcagagactatgaggtagataggctgggagtagaagtagagtgatctatggagcggaccagtactaatcagtcgagaacttgaccaaagcgaaggttttttgttggttgaaattcagttttgagcgagtaagctcaaaagagagtgcggtggcgatagcaagaaggatacacctgtacccatgccgaacacagaagttaagcttcttcacgccgagagtagttggtgggaaactgcctgcgagggtaggtagccgccgcgctcttttttaataatccggtttagctcagttggtagagcgcttgactgttaatcaagatgtcgtcagttcgaatctggcaaccggagcaaacgaaggacagaccctatggcctgtcctttttttgtcctcttttttctttttgttaccgataacagttaacttaaatatgtaaatagtgtaaaatgtaagggtattcaatttttgaaaggaggatacatgatggttggaatagttctagctagtcatggcgcctttgctgagggaatttctcagtctgccgaaatgatttttggtaaacaaactaattttggctcagcaattcttaagcctgatgagggtcctgatgatgttcgtaagaaaatggaagatgtaatcgcatcttttgataatcaggatgaagttttgtttttaattgatttatggggaggtactccctttaatcaagcaaacaaattgttagaagaacacggtggtaattgggctatagtaacagggcttaatttgcctatggtaattgaagctttaactcagcgctttagtgttgaatctgccaaggaaattgctacggcaattgttgatcctgctaaagatgggattaaaaccaagcccgaatcattagcgcctaaatcaactgtaaaacaagaggctaaacctgcagaagttcaaggtgatattcctgaaggcactgttttaggtgatggtcatattaagtatgttttggcaagaatagattcacgtttgttgcatggtcaagttgctattggttggtcaaaagctatgaatcctgaccgtattattgttgttagtgataatgtagctaaagacgatttacgtaagaatatgattcgagaagctgctcctactggaatcaaagcacatattgtacctattaagaaaatggctgaagttgacaaagatcctcgttttggagcaacgaaagcactacttctttttgaaaatcctgaagatgcacttcaagcaattgaagatggtgttcaaattgacactcttaacgttggttcaatgtcatatgcagttggtaaagtaaatgccaatagtgttttatcaatgaaccaaaaagatgttgatacttttaagaagctaaaagaaaagggaattaaatttgatgttcgtaaagtgccaagtgataatcctgaaaatatggatgcaattttaagtaaggcacaaaaattacttgatgaacaaaataagtaggaggaaatagatttatgaatgctattcaaatgattctggttgtattcattgctttcctagctggtatggaaggtattttggatgaatggcaattccatcaaccaatcgtttcatgtacgttgattggtttagtaacaggacatcttaccttagggattatgttaggtggttctttacaatttattgcaatgggttgggctaacattggtgctgcagttgcaccagatgctgctttagctggtgttgcttcagcaattatcatggttcaaggtaacttgggtgaaaagcaaattggtaccgctattggtattgctgttcctttagctgttgctggattagggttaactatgattgttcgtacccttgctgttgcaatttcacatattatggataaagaagctgaaaaggcaaactttagagctattggtatgtggcaattgattgctaccggattacaaggtttaagaattgcaatcccagcagcgttattgcttgcaattccgtcttctcttgttaaagcttggctttcagctatgccagcatggttatcagatggtatgaccattggtggtggtatggttgttgctgtgggttatgcaatggttattaacatgatggcaagtaaagaagtttggccatttttcgctatcggttttgccttggcagcaattaaagatttaacattaattgctcttggtgcaattggtgcagctcttgctttaatgtacttagctcttgaaagtaatggcacaagcaaaaacaattcaggttctaatggcacaggtgatccattaggagatattcttgataattattaaggtctaaggaggaatattaaaatggcagaaaacaaaatccatttaactaaatcggaccgcttgaaagttatgtggcgttccatgttgcttcaaggatcttggaattatgaaagaatgcaaaatggtggttggtgttattcattaattccagctcttcgtaagctttatcctaataaagaagatcaaaaagcagcactacaaaggcacttggttttctttaatacccacccatatttagcttcacctattctcggtgttacattggcacttgaagaagaaaaagcaaatggtaaggaaattgaagaccaagccattcaaggtgttaaggttggtatgatgggccctttagctggtgttggtgacccagtattttggtacacagttcgtccaattgttggttctcttggtgctagtttagctgctcaaggtaacattttagggccaatcttattcttcattgtttggaacttaattagaattgctttcttgtggtattcacaagaatttggctatcgtgttggttctgaaattaccaaagacttatccggtggtttgatggggaaagttactcgtggagcctcaatgatgggtatgtttgttttaggtgccttaattgaacgctgggtaacgattaatttcaagccagtagtttctacttcgccacttcaaaaaggtgcctacattgattggaacgctttaccaaagggtgtaaaagcaattcaacaagcattgattcagcaaagtcaaggcttatcactaactagtagcaaggtaactactttacaagataaccttaatagcttaattccaggtcttgcagcacttctacttacattcttatgtatgtacttattaaagaagaaggtttctccaattattattatcatcggtatctttattgtaggtattgctggtcacgtaattggtttgctataagatggtacaatcaattaataatcaagttgatttaacgatgcctgctacctggcagagaggtgttccttgttatggtaaagtaatgattggtaataagggatttgaattctataatgaaaaaaacattcaagattatattcaaattccttgggaagaagtaacctacgttgtggctgctgttcatttcaaaggaaaatatatccctagatttgaaattagaactagaaagaatggtaatttcattttttcagttaaggaaccacatcgctgcttaaaagcaatgacaaaatatcttcctgcagatcatttaagaagagctttgagctattggcagaaagttaaacttcgactattaggtcatgaatagaaaaaagtccatactttagggtatggactttttatttgtgtttttctaaatagataaaaagaaatagtcgaaagaagataaaaataaaaacgcaagtatcaaaacttgcgtctttattctgtattaattattattcttttcccgaataaacttagtaatgctatataagattacgaaggttactaatgcagccatcattggaattctaaatttatctaaatatagtagtaaggcaatcattgcaacgaaaaatgctaaaactaagtaatctagatatgggaatagtggcatttggaatgactttaaattttcattagctgtttctttgcggtagcgaatgtgggttacaatcatgattgcccatataattaagaacatactagttgaagtagaagaaataaaagtgaatgccgaatctccaataatcaaagtaattaatggagcacatgcaataatcaatgatgagaaaatcaaagcgttgcgtggtacttgagttttggaaagcttaccaaatgtctttgaccatttagactttccatcaaagttgactgagaataacaatctaccagcactgtataagaaactgttagtagatgaaattgcggcactaataacaacaaagttaataattgaaccagcattcttgatcccagttgcgcttaatgcttgaacaaatggactactggtagttgaaatcttaggccaagggatggctactaaaattgcaacgatagcaattacataaaacagaataattctaattggtaattgatcaattgcacgtgcaattgtgttcttgggatcttgtgcttcagcagcagttaagccgattaattcaacaccgataaaactgaaaattaccatttgaaagccaagcaagaagccgtgacttcctttagcaaagaagccaccaccagcatttagattggccaatgaaatatcaccgtatttcgttgattcaccaactattaagaagtaaccaatcattgctacaaatgctaggatagttagaattttgatgattgcaaaactaaactctaaattaccaaaaacttttgcagaaattaggttaataattaacagtacaatcattgttactagccctggaagccaagttggaaggtgtgggaaccaatattcaaaataaattcctagagcagtcaattcagccatggctaaagttagccaacttatccagtaaagataaccactaataaagccaacgtttttaccaaggtatttttcaataaattcaatatacgtatgtttttttaaatcagatagaattaattctccgagtgcacgcataagtaagaaaaggaaaaatcctactataataaagattaaaattacggaagggcccgctcggtgaatactatctccaacacccaagaatagaccagtaccaattgttccacctagggcaatcaattgaatatgcgagttgctgagagttcgacgataaccggtttgtattgtattcgtcttttcttcttttttcatcaagtctccctttctaaaaagtagtatggctaattagaccatatttatcattatacctaaaattgctaggtaatttcattaaaagaatatgtttataacaaaaaaacctaggaaaaacctaggttttgtattatgcaccctgtaggagtcgaacctacaaccttctgattcgtagtcagacactctatccagttgcgctaagggtgcatttaatatacatttatattatagataatttaataaaaataagcaataaaattatcacttatgctgattgccagaatcgaactggcgaccttctctttacgagggagatgctctaccaactgagctaaatcagcttaataaaagaagtatagcaaaaaaacaatctactggcaattgtaaaattatgagtgatatgaggtgtatttatgggatatttttatttggcaattgcaattattggagaattaattgggactactcttttaaagatgtcacaaggttttagtaaatggggaatcggaatagtggcattgatagcatatgtcatttgtttctatttcttcagtaagagtttaaaaataattgatttaggagttgcttatgctatttggtcgggagtagggatagttattactacaataattggaataataatatggaaagaaaaggtaaatctaattacaattttagctataacgatgataattatcgggattatgttgttaaatttgatgtctgcaagtaactaattatgaaataaatgcttaacttttgtaacttttgtaattttaatcttctaaaggatgaataaaacagtatttagtattacaaatatttcaaattgtaatatttgacgtaatttttttaataatctatctatagctgtgtaacttttctgaaatattagcctgctagtatatatcatgtcaattgaatgacagacgaaattttgacagacgagaaaagttattattaaggagagattattcttgaaaaatacaaagtctatcagattaaattcattatttacgaaatttatggcggttgcagcagttactttaactggtgtaatggcaactaacttgaaatcaaatactgcacacgctgcaactattgttaacaatgatactgatgtagttactgtaaattatgttcctggatatggaattgctgtttggaataatccagataatcctcattttactggtcagagattagcacatggtacttcttggaaggttatccaaactgtatactcttcaactggtgaaaagtggtatgacttggggttaaatcaatgggttcctgctaaatatgttgtaagtggctataacaagtctacttctaacaactcagttgcaactgttgcacaatcaagtgcacagcctcaaagtacagtatcttcaaatactcaaactcaagcagtatccgctaactcaagttcttcaaatgcttacaattcagcatcatctgcagcaaacacaactagttcatatactgcaactacaacttcaactagttcatacacttcaactgcaactggttctgaagcagatgctaaagcttggattgcaaataaagaatctagtggttcttacactgcacaaaacggtcaatactatggtaaataccaactttcaattagttatttaaatggtgatttatcagcttcaaaccaagaaaaagttgctgataactacgtatacagtcgttacgactcatggactgctgctaaggcattctggttagcaaacggttggtactaagattttgaatttattctgaacaaaaataaaaaaggactcaataatgagtcctttttctttttgcaataaaaatatgatactatttatgaatgtaataggttaacaggagaataatatggctctttgtcaaatcctgttgataaagagtgatttaaagaatcaagcaatatataaattgcttggttctttttctttaactttgttttcttctaatctaattcttgttagtaagttaatgtaatttgagtaaccataagcagtacgctcaatctgtttaatcttacgattgaaaccttctaaacaaccattagagtagctgaatctagcaccatttaagactgctcgtaagttatgcttaaaggtcaataaagtcttgtgcatcaaagtgccaacctcagctttagaattaattatttctttcaaagaattagtatctctagctttaagagcagccataaagtcttgcattaaattatacgcattatctagccttggatcacaactaataccttccattacaacttgttcttgagttagatagtctttgaagtgccaattataatgagggtgaatcttatctaaatcaacgaaagacttaagataaagcttccaaggtgatttgagcagttgatattgccttgctcgtttatcaaaagacttcatgactaaaactcttaaagaattaaaagagcgagttaacatctgtaccatatgaaaacgatcaatgataatttctgcattagggaaacaagctctaacaatattttgatagtaaaagtttaagtccatagaaacagttttgacgttagcacgagcactaggagagaatttatcaaagtatttaagtaaagactttttgtatcggtttctgaggatttgaaccacttcatgcttttgaccatcaagacaaataaagtgtagctttttatcgacgcctttaaattcatcaaaggctaagtgttcaggtaaatagttatagttatcaataaaacgatgagaacaagaagctaaaacgcgttgaacagtattaacagatagattattctcacgagcaatactagtcatagaacggtcctcagttaaagcagaaagaacctttcttttggcaggattagagatagaacaatatttattaactaacttagatttggccattgaacgagtattacaatctcggcagagaactctttgcttatttaacctgatgatcacaggactactagcattagaagtaataaatctaatattagtctgaagatgaccattatgaatcagattaacagaaccgcaaaaaggacaagcaggctgaataagagtagcttgaaagaccttatacttaataccgttaattaatttaaagaaatgagcattaaaagtgatattagggtcttggatatcgagtgaaaatttaatacaatcattgtaagaggacatagaaaaaccttcaatctattaaaatttgagtcgtgttgaattttattgtaagtagaggggctatggcctcttttttttgcaataaaaaacctgttaacagtttaactcaaataaactatcaacaggaaaaattatagaaccaataatatgagcaagacaatttatttagtccgccatgggcagactttttttaattattatcacaaagttcaaggaagagtagattccccattaactgttttaggtcagatgcaagcaaaggttacaggagatttctttaggaaaaaaggaattaaatttgataaggcattttgttcaacgcaagaacgagcatgtgatactttagaatttattactcaaaagagcattccatatgaaagattaaaagatatgcgtgagaaatggtatggaatttatgaaggtcaagatgaagtaactttgccttggaatcatgggagtggtgttgtagatccaaatatggaagctgattttttagcaattgaaagaatgaagagggctattgaatatattaaaaatcagctttcagatggtgaaatcgctattgcagttggacatggagcaattttagggatgtatgtaagagatatgtttcctaagactaactttcactttgaaaattgtggtgtagttaaattgatttttaatggtgatgaaatagaattcggtggtagctactggccagctaaagacctgaaataacagaaaaattcaacttttttaatttttttgttgacgaaaaaagaattattgggtattatattatttgttgagcaacaagtaaaagctcacaaaggaatgggttatagccaagtggtaaggcaacggtttttggtaccgtcatgcactggttcgaatccagttaacccaataattaagagttagctttggtttcaaaacgctttaagcattgaaactaaagcttttttatttttccgtgtgtagtagaaattaattgaaaacagtaaaaaggaacaatattaggagcaatatttttccgaaaattagctaatcgcagtacttttaaaattggtctacttggctcggatacgtcactttatatttaaacatatctaataaaataatctttcatagtatgtgaagccttcgggcttcttttttgtttaactatttatcattaaaataagtgcctcaaaaaaattaatttataacttgcttttttaaaaaatatcatgtactatatttaagtaacgtttcggaggagtagcgaagtggctaaacgcggcggtctgtaaaaccgctctccctgagttcggtggttcgaatccactctcctccacctgattgggttatagccaagtggtaaggcaacggtttttggtaccgtcatgcactggttcgaatccagttaacccaatagttcttaaagaacacccaacccgaaaagaaagctcgcctatggtgagctttcttttttactaaaaaaattctttttgttaaagtatgtaagattattggttttacttagaggtgataatgtgccaagaattgtaaaagtaggtgctggtggcgacgaaattgattggaaagaagcattaaaaacgctaagagctgatgatatgctacttttaaagcctggtttttatgaattagaacaaggaatatctgcatgtgatgtaactattaaaggaactggggctagtccagaagatacaataatagatggctatatttctgtatcccctgatagtagatatgtaaccttagaaaatttgacaattaataccgttggtgagaagaatgctatttttattccttataatgcagatacttatttaactttacgaaattgttttataaagactgaaattaatgaaaatgcagcacttgcattaaatggaaaatgcacagttgaactatattcgagtcggatagtaaatggtagtgtttcgttcttttctgggtcagacttcagattggaaatgaacgattcaaaaatagattatccagttactaactattgtggactagcattagaaggaattggaactgcaattattaataattcaattatagattcaagtcttaatactttttccgatacaaatattgagctagttgtaaataattctagattgagagatgtccatttagctgggcaaacttggcttaatatgcttaattgtcaagtttattctaaagacgataatgcttttactagtgatgatgagtgttggttaaatattactaattcagtatttactggcggaatgtatttagatggtgctacaacaatgttattacaaaatagtcattgtgaccgtttaatggctatagcagataccaaaacgacaatgactaattcactttgtaagtcacatgctgattttcagcaaagtgcaaaatgtgatgctacaagatcaacttttaatggtagtgaagaatttgagttctttttagctgttaatggagaagctgaatttaaaggacatgatattgttttaaatcctaatggtgctactctagcagtacaagataatgccacttttagaagtaatgttttagcaagtgaccaaaaggcactgagcgttgaatataccaacttgccaaatgtaaatattttaggattaaagtgggagaaaagaaagtaattattatgtagaatgatgaaatctagaccaatttgctctacaatatggttatacgacttgaagacctagttctgggaggcgatgagaatgcaggaaccgatttatattaaaattcataataaaattaaacaagatatcgaaaatcgtgtgtataaggttggcgaaagaattcctgcggaaagacaactagcacaggaatttggggtttcaagaatgacgctgaggcaagctataaaaacacttgaagatgaagggattctggaaagaagactagggagtggtacatatgtatcaagcaaaaaggttcaagaaaaaatgtcaggtgttatgagcttcacacaaattacaagagctaatggccaagtaccctcatcgaaattgctttcatatcgaattactaagccttttttatctgagaaagaacggctaaaaattaacgaaaatgataatgttcttcgaatggagagaattagatatgcagatgatattcccatttgttttgaagtagtaactattcctcaaaaactaataaagaacttttcaaagcatgatatttcaactagtttatataaaactttagaagaaaaaggtggatataaaattggcagtgtagttgaaaatattggtgcaagcattgctaatgagaatgatgctagatatttaaaaattcatagaggggatgccttggttacacgccgacaagtaacgacattaactgatgggcagccatttgaatatacccgtgcagagtatgttgcagaaagatttgaatttacattttcacgttaaaaggagatgcatatgcatctcctttttattttaaatcttcttttattttggtagttgatattcctggggttcttggaagatagactacatcacaatatggttttaaaaaatcaaattttcccttccaatcatcacccattacaaaagtattgatatcatacttttgtacatcttttattttctgatcccaatcttcttctggaataacttcatcgacatatttaatggcttcaaggatatattttctttcggcatatgaattataagcttctttgtgtttcttgaactcattaaattcatccgttgagagacctacgatcaaataatcgcccaattctttagcgcgtttcaacaagcggacatgtccgtaatgtaacaaatcaaatgttccataagtaattacttttttcataatataggctcctttattacctgattaatagtatcatactttaagaaaagacaaaactttgataaagctttcatgtaaggccccttttttgctaaaatttgatagtaagaatagggagagaatatatgaagactttaatatttagcttatatttgaatgtaatgaaagcttttgctcatttagtacctattgagaaagaaagttacgttattttaaacggagcaggtagatcaggttctaatggatatttattttataaatatttaaaaaatatacatccagaattagatgttactttagtagaaccttggccttcttcacatttgtcttggaaaatatggaaaaaaattggttcggcaaaatatatttttacaactcatgaaccatttaaaataaaaaaacagcaaattagtatttctttttggcatggtattccactaaaaagaatgggagttatggcacataatactgcttatcgtggaaataaaaggaatatgaatatttggcataaagaagctgattatgttgtatctagttcggatttttatgaaacattgatgtctagctgtgttggtatagaagctaaaaaatatgtcagaacgggatttcctagattagattatttagtaaagccaatttcaaaatcacaaatacttaatgatctttttgactgcaatgaagctaaagcaaaaatcggaatttatatgcctacttttcgttttgaattggaagataaaaatgtgatggagaagataaagtctggtaatttttttgcattgtctgattttaacatccaaaaattaaacgatcagttaaagaggaataatcaatatttgattatcaagttacacccatatgaaatgaatttagtaaaatcttcgcaacaatcagtttctaacattaagcttttaagtaatgaatatctcgaagataataagattgatttatatgaaataattggagcgactgattttttaataacggacttttcatctatatactttgattacttgcttttaaataagcctattatttttattgataatttattagagcaatatattaataaaagaggacttttgctgtctccttatcaggaaattgttcctggagaattagtcgataaccaaagaaagctattagacagtttagcaaaaatagatgaagatgaatttaaagagtatagacaattttggaagaaaattacattggagcgaaataataattgttgccaagccgtgtatgagttgactaaaaggatgaaataatttgaaaaaaacgttattaaatattttttataatgctgtttatcaaatctttttggttttagtacctttgattacagttccatatctttcaagagttttagggcccaaaacatatggtatatacagtagtgtaaataatacatttcaatttttaatggtattttgtactctttcagtttcttatattggaatgagaacaatttctaaaatacgtacaaatgagtctaaaaaagaattaactgaagctttttggggactatggtattttcaaggaattgctgggttgattactattgcactgactatagtggtatcaataatttttaaagtaaaatattggaactatattctgttaatggtaccatttttaatttccgctcaattagatatagcctggttctttcaaggattagcagactttggtagagttgtacttagaaatactattgttaaacttattagtgttttactaattttaatactagttaaaggacctagtgatttgtataaatatatgttaattatgtcggtttctacaatgctaggttcttttgttttttggtttaatatcagaaattatgtcgggaagcctactaggtatttttataagttaaaggcaaccagtaaagctattattactttattaattccacaaattgcaactcaaatttatacttcattagataaaccaatcttaaatttcttccagaatactacccaagtttcctattatgataattctcaaagaattgcaaatatgattttgggagtcattacaagtattactttggttatgatgcctaaaatggctagtgaaggaaaagaagcacagaaaaagattttacgaaaatcattagaagctacagttatgctaggaactttattctccgtaattgtaatggtcaatactaaagagtttgtaccttttttctttggagaaaagtatattcctatgacgccattaatgtttttcttcacattaactattatttttattccgatgggcggagtatttgctaatcaatttgcgttggcaaataaaagagataaagattatgcaataccagtctgcattggagcggtattagaagtgcttttaagtatcatattagaccatcattttggtgcaacaggggctttaataagcatattgacaacagaagttattgtcttaattttaagaatctggattgttcgagatggttatgaatttaaatatgtatttaaagatattcctaaatattttattattggaatagtaagtttaagtattggaatgttaatcccacagcttttaactagtgctttcttcaatatgactttaaagtcaatactagttatgcttatttatttaggattaatgtttatgataaaactagattttaatcaggacattctaaatgtaataaataaatttcttagaaggaatggataatatgccagaaaaagtagatattttaggtgttaagttcaataattatagtttaaaagggtataagaacgaaattagtagaagattggacaataaaaagtctacttttattgttactgcgaatccggaaattgtgatggctgcgaatgaaaatccgatttttatgaaattgataaatcaagatgctgattttgtaacagcagatggaataggtattataaaggctgccaatattttaaataaaccaatttcagaacgagttacagggtatgatctttttacctggttgctagatgtggcaaatcagcgaaaaaaaagagtttatttcattggagctaaagaagaagtgatttctgatttaggtaagagaattcaaagcgaatatcctaatattgaagtcgctgggctaagaaatgggtattttaaagataagttggatattattgcccgcgatattactaaaactaagccagatatgatttttgcagctttggggtatcctaaacaagagcaattactagatattttgagaaagaaagaattaccagccgttatgatgggtgttgggggaagttttgatgtcttttcaggacatgctaaacgggcaccaaaagtatggcaagatttacatattgaatgggtatatcgttttttgaaggaaccaagccgatttaagagatttttggcattgcctagatttattgaagagatttataggagcaagagaggaagaagataatgaaggttctgcatattaatgctggacttgaaaagggtggtggcctttttcatattattaatttattaactgaagctaaaaaagaaggccaagactttgagttactcactttagcagatggaccagttagtcaaaaggctatctctaaaggaataaagacacatgtacttaagaccaaaagtagatatgatttaactggtttgaaaagattagctcagtttattaatgaaaatcattttgactatgtacatactcatggggcaagagccaatttatatctttctttgataagaaagaaaataaacgctaagtgggtaattacggttcattccaatcccttattggattttgaagggcgtggaattatgggttggatttttactcagctaaacttaaaagccttaaaaaaagcagatggtattttagctattactcagaattttgctaatctattaactaataaaataggtatagataataaaaaaatccatattatttataatggtatcttttttcacgaaagttcggatttgcctgctaaatatgatcatccctattttaatttgattaatgtagcgcgttgcgaaaaggttaaaggtcaagatttacttttaaaagctcttaaagacttacatgatccgcatattagattacatattgctggagatggtagtgaacttgataccttaaaagatctagctcaaaaattaaatatttcaaatcaagttacttttcatggatttgtaaatcatgatgaactgactcatttatatgaaagatgtgatttagctgtgcttacgtcatattctgaaagtttcccgcttgttcttttagaagcagctgacaatctaatcccacttttatcaactgaagttggtgacattaaaaagatgattccgagtgcagattatggatttatcagtccaattggtgatttagatatgattaaagaacaaattcttaaggcaagcttgatgccaagtgttgaattaaaagaaatggctaaacgagagaaagaatatttaatgaacaattttagtttagctaatcaattggaaactataataaaagcttatggagaaatttaacaatgttaagtaattatacaaaagcttttgcttactatattggattaggaccattatttttaactttaattggactttttttaccatcatatcaggttgtttttttagctgaatgtactgtggctttgatagcagctcttctttttattaatataaatttattaactcagttaaatcaatggtttatagaaaaagtgatttctatttcgactattagttgttttttgacattacttctttttgggatgccttttgcaagtagaatagttttatttagttttataaatttgttttttaatctcttttttacgattattaggccgaataccaaaaatatcattttacttttgattaatttctttattggttatgttaatttgcagccattttcaagtagtatttttttaggtattacattactaattttaattagctatttatttgaaagtttagttacacacaatattagtttttaccaggatagattcgtaatcttaatttgtagcttattgatttcaatagtaatttatataagtcaattaaatacagaccattattttattgtaccaacagctttatttttaacagcattacctattttgggagtattagttttaagttatggtttggttcgctcagaattaaaagttaaattaacccctgtccttatttatttacttttatttacttgtatatttggacaagctggtttaataattgctcaagaagtgataaatccttggttcattatagaattattcattctattaactgctattttaattagcttttcttcaaatataagtaaaaatagcaaaattagtattattattcctagttataacggtgctgatacaattgttcaaacacttgattcagtaatttctcaaacttataagaattgggaaattatattagttgacgatgggtcgaatgataatacaaaagaagttgttggaaaatatttgaaagaaaatcctaatataccagttaaatatttaaaggaagaaaataaagatcagttaaatgccataaaatatgcgttacctcatattaatggagaagtggtacatattttacactcagatgatttattagcttccaaatatgtattaaagcaaggtttattttcattattaaatcaaagagtagttggaacttttataaatttagaagaggtaaatgagcaaggtaagcatattcgattagttaaaactgctagtttttatcctactaaacaaactttagcaaaagcagcggttacgtttggaagaaatccttatgtagatgtcgttttttggacaaaagatatatttgaaaactcagtatataagaactatttaactaataatatgccggcttggtttgataatgaaaataaagaaattttgagtatttcaaatggtatatttaccagtttgaaatatcgcatatttgaaggaaattatttaaattcacaagatggtgctgtaaatgttttgtctggtgagcttagatttttccatcacttagtccatgaaatgagaatacctcaattcaaatggcaatcgtttgtttatagagtattgagaaaattaaattgtgatagtttgtatcctgtcatatacataaagaaaaaatcatctttgagtgatttaacacccaaaataatttctttacgtttagattcgttagaaaatcgttatattcatgccatttatgattttagccaaaattatgcgccaaatgataatgtagtggtagatttagaaatagcaaatatttatcatggagcagacattcgaatctttaaccgaaaattgagtaatggtactttagaaaaaggttattatcaaattatgaagattatttcttctggtaaaggtatttggcaagtacctaaacaagatattagaaaatatgaggagatattagaattctttactattaaagattacgtagaaattgaggaaattaataaatgataccaaaggttattcactatgtttgggttggaggaaatccaaagccagaaaaaattaagacatgtatgaaaacctggaagaaacatctaggtgattatgagattgttgaatggaatgaatctaattttgatatccatgaaaataaatatgtagagcaagcttataagcaaaaaaagtgggcctttgtttctgactatattagagctaaggcaatttatgagcatggcggtatctatcttgatactgacgtcctagtccttgataatttagaagatttattgtcaaataaatgttttgttggatttgaaaacaaagataatccctttacagctgtttttggagctgaaaaagggcatcctctaattaaggatatgcttgattattataatgaacgtgattttgaatttgataagcaagatcaaatggcaggagttaataccgtttctgtttctgacattttaaaggaaaaatatggtgctattcctaataatcaagaacaagttttgaaagatgatatccatgtttatcctgatggtattttatgtaatccatctaaggattctaagacaattcatgtatttactggtacttggatggaaggagtaaagccattaaagcgcaaagtagttactttcttaaagctcagaataaaaacaaaatggcaagcaggtctttatgctcaactctttaaataataagtaatcgtaggaagttagaggaaactgaatgaataaaatagggaattttttcaagcgttatgaatggttaggcccttttttggttatgacagttataatttttgcatatctgtatgatcaagttataaatcattcaatgctaatttttaacgatactccttttcactttggaagattctgggaagttcatcaacaaatagcaactggtaaaattagttactttcagtctaacttctcttttaatcaatctggacgaattattaatgctgtatatggtcctttatttgctttaataatgggttcattaacttttatatttactacttggttcagatttcagatagggacatctatacttttaatttatttagctggttttggtttctataaaatggcaaaagaaacagagcaagtttctttgccatttttgaatttaggtttgttcatttttttggaattaggatatattcctgcttggattcaaggacagagtatgatggcttggggtggagctattgtaccttgggtactcagatatggaataaggatgattaaactcaaaaaagaccaaataaatgtaataggattagctgtttcaatggcgatagcagcgcaaactcataatttaactgttgcaatgctaatattggcattaacccccgcatttattgttgcctttgtaaaatcaaatgaaaaaaagaaattgtttagggatgtaatattctcagtaataatatttttatttttaagtgctaatataattggtgccttgttagttttgaagaccaataatatcgcaatgcctgtgcctatcgatttaaaaggaattgcattaaatataactcctaatttggtccaaagaaatcatataacccctttgatgctaatagttttaattattacagcaggtttggcaataattaactttaataaaaataaattaaatttttggcttggtttaggtggagctagttttttctttttgagtactaaagcatttccttggggaataacagaaagattgctcccttttcttaaaaccagttttcaatctccaagtagattaactgttatagcatatcctttgttacttgtttcgctatcgataagtctttcttcaatagctaaacgaaaaaatttaagaaatattattttaaaatggggaattactggtttagcagttatcgcgtctattagcgccttatttgatttccaggcttatcttcatagtaatacgttagcctatttagataataatgtagtggtcttatatagttgggtatataaagtccctaaaagccgtacaatcattagagaagatatgatgtctagaaaccaaggtaaacttttccaagacttagctaatagtgaacctgattatttaccaattactaaaaaaattgattctggccagattgttaatatatacggacaaaaagtagttaaaaacactgataattttgtacgtaaagttaacaaggatggtagtctaagcttaatttggaaacaaaaaaaagccggaaaaaaactattgccaatagttatgtataaacaatctactttatttttaaatcggaaaaaagatagatataagtttgaaagtgtagcaattccggttgttcaagcacgaaagggtatgaatattgctaccttgaagttcaacagcccaatttggtttattattctactttggatatctataattagttggatagctttgattatatataagggttggatgttttgtagtaaaaagaggaaatttttacaatgaaaattatagaatttttcaaaagaaagaatatcttagtttcttttttaataataacgttaataacatttgttttgacatattatcaaattagatataaagcagtttttgtatataatgatacggcttttcattacaatagatattttgatatttttcaacaattaaaaacgggtaattttagctattttcaaactaattatggcttttctcaatctgggagaattataaatgctgtttatggaccaggatttgcatatttaaatggactattattattactatgtaaaaattggtttatctatcaaataattacaacttttttattaaattatttagcaggttacggatacctatatctttgtcgtaaaattaaagtgaaatatctttatgcttatgttacattgccactttttttattaggtggatactttccgacttggatacaaggaaatactttaatgtcatggggacaagcactttgtccgtggataattgctgagggaataaattttatcgttaagaatccgtctaagctttcatactttaaattaggtatttggatggcagttgttgcacaagttcataacttaactttattaatgttaggacctgttttattgtattttgcaattattggatttgttaaacataaaaataagcttgtgttggtaaaaaaaataggtgtcaatataggaatttttattttattgtcattgaatgttataggtggaataattgtcttatttaataataaaatagcactgcctgtaggtgtggcattaaatgaacatgttttacattttagttcttgggattattctataactaatttttcttatctttttgtggtattattactacttcaatttttctttgctttttataattttaagagtaataaattaaattttgaaataacaatgctatgtatgctattgatcttgttggcaagtagagtatttccatggtctttctttgataagcattttcctagtttacaaaattctttccaagcaccgacaagattggttattcttatatatcctttgtttttatcagtaatatccctatctttatctttattgagtcgaaaagtaaggatagaaaatggcgcaaaacaaataattctattagtcctttgtttatttaccttgatgcaatttaatcaaaggcgactttctcaacgaaatagtacacttaactatttgaataataagatggttattaattattcttttccacggtatatctctgctaatcgtgtaacaataaggaagtcattacattcagcagataaaaacaaatttttaactttatttattaattctgaacctgattatttgccaataaatgagaaaacaaatgctatatcttcttatggtaaatctataatagacaaatataaaaactttaatcatcaagtgttgcctaatggttctttacagttaaaatggaaagctaagaggaatgaaaaaattattttaccaattgtggtatataaacaatccattcttttagtaaatggcaaaagaaataacaaatatgcaaaagggttaaatgttccaattgtttattctaaaaagggtattaatgtagccaatctaagattcataactcctctttggttcgtcattatgctttggataactgttatttgctggataataactattggatatcttctttataagtctgtgcgcaagcacagaccttttttgttaaaataagaaaggtattatttattaattgcaataggagaaaataatgttttataagcagatcgatgaagatgattcattaattttgcatactgatttatacgaaatcaatatgatgtatacctatttcaaagaaggtattagtgaaaagaaagctgtttttgaagtcttttatcgtaaagaaccatttggtaatggatttgcggtttttgcaggattagaacacatagttcaatatctcaatgatttacattttagtgaaagtgatttggcttttcttaaagaaactcaagactatgatgatgactttatagaatatttgcgaaacttaaaactaaatttgactgttcgttcaatggaagaaggacaattagtttttgcaaatgaaccaattgtacaaattgagggaccactctcacaatgccaattagttgaaactacaattttgaatattgttaacttccagactttgcttgccactaaggctgcaagaattaagctggcagttggtaatgatggtttaatggaatttggtacacggcgtgctcaagaaaccgatgcagcattatggggaactcgtgctgcatatattggtggatttgacgcaacaagtaacgtgcgtgctgctaaattattcggtattccagctagtgggactcatgctcatgccttagttcaagcatttggtaatgaatatgatgcttttaaagcatatgccgaaacacataaggactgcgtttttttagttgatacttatgatactgttcgctcaggtgttcctaccgctataaaagtagcgaaagaaatgggagacaagattaatttcttaggtgtaagaattgattcaggtgatatggcttatatctctaagcaagttcgtaagcaattagatgatgcaggatttaaaaatgccaaaatctttgcttcaaatgacctagatgaaaaaacaattaccaatctaaaaatgcaaggtgccaaaattgatgtttggggaattgggaccaaatttataactgcgtttgatcagcctgcattaggagctgtatataagttagtagcgatagaagatgaaaatggtaattggcaagatagtttaaaaatttcttctaatgcaattaaaatttcaactccaggtaaaaaacaagtttggcgaatttgtgcaaatagtgatcggaagaatgaaggggactgggttgctagagtaggagaagatcctagaagctttaatgcactatttatgttccatcaacaatatacttacataaataaagtggtgactgattttacagccaagcctttattgaaagatatttttattgatggaaattatgttgataagccacgttctcttgacgaaattaaggctttctgtcagtccaatttagaaaacttgtgggatgaatacaagagaagtcttaacccgcaagaatatcctgtggatttgtcacagaacttgtatgaaagtaaaatagatttaattagtgagataagaactaaaattagaaatcgaggcttgcattaatgaaaaaattgcaaaaagaaattatagcgtatgaacatgttttacctgaaattgatccagaaaaagaaattagacgatcggttgatttcttaaaggactatttaaaagctcacccatttttaaagagcttagtattaggaattagtgggggccaagattcaactttgacaggcaagctttgtcaaattgcaattgaagaattgcgtcaagaaacaggtaataaagattataaatttatcgcagttcgcttaccttatggtgtgcaaaacgatgctagtgatgccgctgatgcagttgcttttcaaaaaccggatgttgatttagtcgtaaatataaaagatgcagttgataagactgttgctagtcttgaacaagctggagtaaaaataactgatttcaataaaggcaacattaaggcgcgtcaaagaatgatcgttcaatacggtattgctggagcttatagtggtgcagttgtaggtacagatcatgcagcagaaaatataactggattttatactaagtatggcgatggagctagtgatcttgttccgttatttagacttgataaacgtcaaggtaaagctttgcttaagtatttaggatgtccagaacatttataccttaaagcacctacagctgatttagaagaagacgctccagatttacctgatgaagtagctttgggtgtaacttataaagatattgatgactatcttgaaggcaaagaagtgaagctggaagctgcagaaaaaattgaagcttggtggaacaagactaagcacaagagagagttaccaattacagtatttgatgacttttataaaaaatagataacttgaaacttaagctttttttacctataataaagctatcataagggagtaacggcaatgtaaattgcgataagctcaacaaccgaaagaaaaactttctgggcttatcttaattagtgagacttatgtgcgttaagcacataggtcttttttgttaggaggtattaaaattgctaaaagattattattctcaaagccctgaaaatattgaaaaagaacttgatactaatgttcagttaggattaagttcagctaaagcaaaagaacgtttagaaaaagatgggtttaatgctttagcaactgaaaagggcaagagtatgcttgctcgatttattgatcaatttaaagactttatgattattgtcttgttgatagcagccctagtttccggtgtagttgctggagagtggactgatgctggaattattttatttgttgttttgatgaatgcaattttaggtgtagttcaagaagcacgttcggaagctgcaattgaagctttaaagaaaatgacaacacctgttgcacatgttcgtagagatgggcaagtgcttgaagtaccaagtacagaactagttaaaggggatgttgttttacttgaagctggggatgttgttccagctgatttaagactaactacaactgaaagcttgaaaattgaagaagcggctttaactggagaatcggttccagttgaaaaagataaatcattaatttcaaaagctgatgttgcgttagctgatcgagttaatatggcatattcttcaaccaatgtaacttatggtcgaggagaaggaattgtagttgccactgcaatggaaacagaagttggtaagattgctacaatgattaacgaagctgatgaaacagatacaccattaaaacaaagtttaaatcaactgggtaagactttaacctggatgattttaggtatctgtgctttagtattcgttgttggtattttgcgtaatccagctaatgaaagtcaaacaagtttaatgattgacatgtttttgattgctgtatcattagctgttgcggcaattcctgaagggttgcctgcaattgttactattattttagctttgggtacacaaacaatggctaagcataaggctattgtaagaaagttgccagctgttgaaacattaggggcaactgatattatttgttctgataaaactggaactttgactcaaaacaagatgaccgttgaaaaaatatattatgatggtcagttacatgatgctagcgaagtggttgatgctaatagtgatgttatgcaaactatgttattagcaaatgatactaaactacgagctgatggcttacttggtgatccaacggaaacagctttaactcaatttggcttagataagggcattaatgttgctgatttattagaaactaaaaagcgtgtacaagaagttccgtttgattcagatagaaaactaatgagtactgttaataaaaacggagataaatattatgttgccgttaaaggtgctcctgatgaattgctaaaacgagtaagtaatttatctgataaagaaaaggaaaatattcttttagctaaccaaaagatggctcaaaatgcacttagagttttaggactcgcttacaaagaagtggataagccgtttgaagaagttaatagtcaaaacattgaaaataatttaatttttgctggattagtcggaatgattgacccagaacggccagaagcaaaagcagcagttgcagaagcaaaagcagcaggaattagaactgtgatgattactggggatcatcaagtaacagcacaagctattgcagaacgtctcggaattattgaaaagggcgaaagtaaacgagttctaactggtagtgaactagataagatggatgatgcttactttaaggagcatgtatctgattatagtgtttatgcacgtgtgagtcctgaacacaaagtaaaaattgttaaggcatggcaggctaatgaaaaaatcgttgctatgactggtgatggtgtaaatgatgcgccaagtttgaaacaagctgatattggtatcggtatgggaattaccggtactgaagtttctaaaggtgccagtgatatgattttagctgatgataattttgcaacaatcgttgaagctgttaagcaaggaagaaaagtattttcaaatattcaaaaagctattctttacttgatgagttgtaatgtcggagaagttataactgttttcattatgacaattatgggttgggacgttttacaacctgtacaattgttgtggattaacttggttactgattcacttccagcaattgcactaggtgtagaacctgttgaagatggtattatgaatcgaaaaccacgtggtagaaagtcaaacttctttagtggtggtgtggctagttcaattgtttatcaaggtattttagaaggtgtattagtattaattgtatacactttagggcttcatattggtccacatgttgcggatcctaaacttcaacatggagatgcgttgacaatggctttcctaaccttaggtttaatccaattattccatgcatttaattctaaatatgttcaccaatcaatctttagaaagcatactttccaaaataaatggtttaactgggcaattgtaatttctgcaattattatggctgcagttgaattgccattcttaactaacgtatttaaagttacagagttagatttggatcaatggttagccgttttaggaacaggctgcttaatgataattattgttgagctagttaagcttgtacaaagaaaaatgggaaaagaataattaaataaaagagcaacgtgatgatgttgctcttttatttatatcatggacatagtatagctattttgttaagctaggtacgattgaatatgagaggttaacaaaatgaaaataaagcgatggaatttaaaaatttttactgcagttgtttttatatattttgcagttcttagtttattattgggctacaatgcagatgattattggtggggcggtgtaaaatcactatattcctatttaacaggaccaatgttttttaattatgatggacgttatgtaggagatggattagcaattattggaatgcattatccaatattagcggcccttatttatgggatgaccttatctataataatttatagtatatattcattaactaagcgtttggatttaatgattggaacttttgttgcaattttaattatgccaagaggtatttttgctcaaactattggatggaaagcaggattttttaactatgctttgtcaatagttccaattttaatattgctacttgtaacaaagtatatattatttgattctaaagtaaataagcttcccctttataatttaatagctgtttgtataatattgttttttggttcttttatgtcagaacctataactttgacgatacttatcgatactcttgttttgatttttgtagctaactttttaaaaaagagtgtagtaaaagatttcttttattttttctttttttctctattaggaactattgctatgtttgcaaatagaggctactggaaaaatactggggttcataaatatagtttaggcgcaagtatccctcaaatcttgctacagctaagatcagaatatattttaatctttattttaggactatgcgtttctttatttattttaaaaagaagtggaaattcccacttaccatatgtgttagctggatttgatatattagtatttgttttagcagtagtaagtgataaaatagttctttttaataaaataagtcgcttatctaattatctggtaattctttgtttgggagtatcaataatagtattcttctgcaattacaatttattgaataaagatgaattttggatatcactatttttggtcttaaatgcatttgcttcaataattccttatattgttgtatcgccttttggtccaagaagtatgctttgcttctatattttaatggtaattttttccttttatttagtcgctatttcaaattcattaactagaaaatgttttatcattttgatttcttgcatggcatttttatacggaagttttattttatttaaggcaaatcaaattaatgtggcgaagactagaaatagtgccttaattgaatatcaggtgaaaaataagacctatattgcaaacaataatcgattttattatgtgcaaattccaaatactgatatgtggtggaatcctcgtttgcaaactcatgatgatccaattatttcatattataaaattccgaatacgactgttggcaagttagttccatggtatgaagtaaagaatatttcttctaaccagggagaattactatttaaaaaagctaaaaaattagttaagtaaaaaggtgacctttgaggtcatcttttttgttgtaaaataaagacactatgaacgaaatagaattactaaatcttatccaaaaaatatccctagagtcatttgattatccatttattggacaagtaaaaattaattatcgatttaaaacaaccggaggacgttatcatttacgggatcatcatattgaaatcaatgcacatttcttgaagaaagaatatcgacaagatttggttggtattattaagcatgaattatgtcactactaccttcatgttcatcatatgggatataagcaccaaaatcgggatttcaaaattcttttaaggaatgtaggtggaagtagatatacgccagatattggacttactagaaagaaaaaatatacttatcaatgcactaattgtcaaaagctttattatcgagttaaaagaattaacttgaaaaaatatgtttgtggaaaatgtcgtcacaaattagtacttttaaaataaaatacttgcattaagttggtatgtcgtgtatcataataagagtgttgcgggcgtggcggaatggcagacgcgcaagactaaggatcttgtgatcgcttttagatcgtggaagttcgagtcttctcgcccgcatacagtaaggaagttgtgtaagcagcttccttttttatttatcaaatgtatagtgaaaagaagtgttactatacaagaaagcatcttttttatagaattattttggatggaatttcaaggtgaaaaataaaaaggctagaaacttagcgattagtgcaatttttttagcacttctattgttagaattatttattcctaatatcggaaatatatatttatttcctggtttaccagctgtgacaacgatacctttgataattgcaatatatagtgtattgttagggccaaaagcaggaataggattaggaattatttggggcgtaattagcatgcttttggcgtatatacgtccaactagtttggtaagtttattgctttttcaaaacccaattatcgcaataattcctagagctttatcaggatatttagctggcttagttactctaaaaaaaacaaaattatactatagcttagctgggttaacaagttccttaactaatacaattttagtaatttgtttggctagcataatttttaatggcaatcatgagcttttagctcatttaggaaatactaatggaaatttactgattcttttaacttcggctttagcttttaatggtatacttgaagctatatttagtgcaatattggcacctataattttgaaaccattgatcaaaataactcagtacaaatagaaatcaggataaagatggcacgttcaggatctcgagtaaaaaaaacaaccctaactttagttaaagtctttggagtattacttatcttagtagtggcgtttgtttgctttcggtattaccgtagacaagcaatcaataatgaattaattagacaagaacaactagcaagagaacaggctgcagctaaggaattaaagataaaaacagatttcataaaaaaaatagggccaattgctcaaaaagctgatcaaggctttgctcttttgccaagtattacaattgcccaagcttgtttagaaagtaactatggccaaagtgaactatctcaaaagtataataatttatttggcgtaaaaagtaatgatcccaatacttcaaaaattttatctactaaagaatatgttaatggcaaatggattacagtaaaagctagtttccaaatttatgattcatatgaatcttcaattcaagctcatgctagattatttcaaaatggtactacttggaacaaagatcaatatcaacatgttttagcagcaaaagattataaaacccaggctaaagcactagttacagatggttatgcaacagatcctgattatgcttccaagttaattaacttaattgaacaatttaatttaaataaatatgacaattaatcttttgtttttactagacttcttcgttaacgaagaggtcttttttcgttataatgataaacgtgttaatttggtgaaagggaaaaatgtatgagtcgcgaaacgattttaaaagggttaaaccctcaacaacaagaagccgttgaaactactgaaggaccacttttagtagtggcaggagctggtagtggtaagactagtgttttgacaagaagaattgcttatctcgttgaagaaaagggagtagccccttggaatatcttggctattacctttactaataaagctgctacagaaatgaaagaacgtgtccaaaagttgttagggcctgcaggacaagatgtttggatgtcgacttttcacgcactgtgtgtgagaattttacgtcgagatgcagataaaattggctattctcgaaatttctcaattgctgattctagtgaacaagttaccttaatcaaacatattgaaaaagatttaaatattaatcctaagcaatataatcctagagctattctgagtgcaatttcgaatgccaaaaatgatttgctcaatcctaaagattttgaagcagctagtggaaatcgaccttttgatcagattgtcagcgaaatttataaagaatatcaaaaaagattgggtcaagatcaaattatggatttcgatgatttgattatgcaaactttagttttattccaaaaagataaggctactcttcattattatcaaaataaattccgctacttattggttgatgaatatcaggatactaatgaagctcaatatcaactttgtcgtttattggcagcacaatacagtaatgtctgtgtagttggggatggcgatcagtcaatttacggctggcgtggcgctaatatggaaaatattctgaattttgaaaaggattataaagataaaggcgttcatactgttaaattagagcaaaattatcgatctactggtcatattttaagtgcagccaatgcagttataaaaaataatcaaaatcgtaaatcaaaaagactttggacagatcaaggttctggtgaaaaaataacttattatcgagcacaaagcgatgtagatgaagcaatttttgttatttctaaaatcactgaagcagttaaggctggaaaaagagactataaagattttgcaatattatatcgtactaatgcgcagtcacgtggctttgaagaatccctagtcaagtctaatattccttatcaaattgttggtggtcataaattctacgatcgaaaagaaattaaagacattttagcgtatttaaaattagttgctaatacgagtgactcaatgagttttaatcgaattgtcaatgtgccaaaacgggggattggagcagcaactgttgataaattattaacttttgctaatgagcgtggaattggagtaggagatgctctttctaatttagaattagtgccagtgtcagctgcagcaagtaaaaagttagctgattttaatgctaaattggttgattgcgtagcttatgctcaagatacaagtcatacagtaaccggattaactgaaaaaattttagaagattttggttataccgatgctcttaaaaaagaaaagactttagaaagtgctagtcggctagagaacttggatgaatttctcacggtaactaagcgttttgatgataatttcgaagcagacgatgatgaaagtctaccaattaatgattttttgagtgaggttacattgcttagtgaccaagatgatattgaagatgatggaaatcaagtaactttaatgacgcttcatgcagctaaaggattggaattcccagttgtctttttagtaggaatggaagatggcatttttccattatcacgtgctatgcttgaagaagaccaacttgaagaagagcgacgtttggcctatgttgggataactcgcgctagagaaaaattatatttaactaatgctttttctagaacaatgtatggaaaaactacctcaaatccagcatctaggtttgttcaagaaattaagccagaagatttagaaaccgaatatgcgggtggagtaagaaaagctaatacaaattcatttacttcgactaatagtgttccattctttaataaaggtgaacgtgccaaaagccaagtttatacagctaaaactgctactaaagctagtggtgctattggtgcagaaaagcaaggctggaatgtaggagatcaagttacacacaaggcttgggggaaaggtgttgttgtcaaagttaatggtactggtgaagatatggaattagatattgcttttgaagctaaaggaataaaacgccttttggcagcatttgccccaattaaaaaggtataattaagtagaaaaacagttgatataaggaggttttatggctaagttgaataagaaagcggcccaagaagaaatcgaaaatttacgaaaaaagttgaatacttgggctgaacaatattatgcacaagatgctccaagtgttgaagatgctgtttatgatcagaattaccaaagattagtagagcttgaaaagcagttccctgagttagtaacctcggattcaattacgcaacgggttggtggagaaataaaatcagatttaggaaaagttgaacaccaaattccaatgctttcaatgggcgatgttttttcaaaagatgagttacgtgaatttgatcaacggattcaaaaattagttggaggcccggttgcttataatgttgaattaaaaattgatgggttatccttatcacttgaatattcagatggaaagttagttagggcttcaacacgtggtaatgggcggattggtgaagatgtaactaaaaatgtgcaatatattagtgatatacctaaaactttacctgaagcgcttactatggaagtacgtggcgagtgctatatgggaaaagaagcctttttaaagttgaatactgagcgggatgaaaatggtgaggcagtatttgctaatccaagaaatgctgcggcaggaagtttacgtcagcttgatccacaagttacgaaaaaaagaaatttgagtacttttatttatacttgggttaatccaccaaaggaaataactagtcaacatcaagctatccagcaaatggcaaaattaggctttcataccaatgaaactggaaaaagattagccaatttagatggagtttttgcatatattgatgaatatactagtaaaagagatagcttgagctatggcattgatgggattgttttgaaggttgatgatttaactttacaaaaacaattaggcaacactgttaaggtaccacgatgggaaatcgcttataaattcccacccgaagaacaagaaactatagttcatgaaattgtttggacagtgggaagaacaggggtagtaaccccaactgctgtaatggatcctgttgaattggcaggaacaacggtgtcaagggcagtacttcataatcctgatttacttaagcaaaaagatgtaagaattggtgataccgttagactgcacaaggcaggcgatattattcctgaaatttcagaagttgttttaagtaagcgaccagtagatagtaaagtatatgaaattcctgataaatgtccatcttgtggacaagctttggttcatttagagggagaagttgcattacgttgtattaatccagcctgtcctgctcaaattgaagaaggaattattcactttgcatcacgcccagcaatggatattatggggttaggtcctaaaattgtccgtcagctaattcaacataatttggttaaagatattgcagatttatatcatttaacagctgatgatttagctgaacttgatcattttggtgataaatccattaataatttgcttactgcaattgataattcacgacaaaattctgtagaattattgttaaacggcttaggtattgatcatgttggtgctaaagctgccttgttaattgttcaaagatttaaaaacttaaataagattatgcaagcaagcgtgtcagaactaaccgcaattgatacaataggggagacgattgctgagtcaattacaacttacttcgcacaagctagtgttcaaaaattagtccaagagttaattgatagcggagtaaatattgattatttaggtgaagatgtgtctaatgaaaaaatagctgataatttctttaagaacaagacggtagttttaactggaaaattagcacattttactagaagtgaatttactaaaaagcttgaaagtcttggtgcaaaagttaccggttcagtttctaaaaaaactgattatgttatttatggaacagatgcaggatcaaaacttactaaggctgaaagcttgcagattgcacttttaactgaagaagaggcaattgaaaaaattcaataaaagggattatgattgtgaaaaagtttttacaagtaactttgttagcatcatcgatgctaattttagctggttgtgaccgattgggtgattctgatttagcaaataatgctacaacgactaataataaaaccaagaagtatcaaaccacatcaactaatggtggatatactgttttattaaaaaatggaaagtatgtgactagttcaacttctggacttacttcaagtgatattgataatactgttgacagtgtagcgttagaacgtggtttagttagtttagataagaatgtattttcaacgagtaaatatgttttccaagaagggcagaaattatctagttcgactatttcatcgtggttaatgagagaatcaaaatcttatccagatggtcttaacccaaaaaataatggaaaaactggtgagacaactagaaatccagttattttaaatcaaattttggagcaggattttttaactggctcgggagcaaattataaattatctggtatttctttaggcttagcgcttaattctgttgattactatcaaaagaaaagtggaggaccacaatattcaagtagtatttcacgggctaaacaggaagcatatgggaaagaaacagctgataaaattgtagctagattgcgtaagaaaaaaggtatgaagaatattccaataatgatttccctcttttcaaaaactagtcaagattcactagttggcggaactttctttgcatatggcgtagcagagggtaatagtagtaaaataactaattggaagtctgtttccgaaaagagccaagtcttgccaactgtaaacaatgaatcacctgttaatagtgatgacgcttcagcatttaatagttttaaatcagctattgagaattattttcctaatttgagtggggttgtagcaacagttcgctatcaagatggcaaattaacccaggagaatatccaaattactacacaattttatggctatgttcaaattcaaagttttgctagattagttcaatctgaagcgaaaaagtatttggctaaggatgttccaatcgaaataaaaattagttcggttaatgatgtccaagcagttgtttataaaaacagtggtgatgatagttatagctcacatatttatggtggtcaataaggaggtaaaatagtggaaattacaaaagaagaaattaagcacgtggcagctttgtcacggcttgaatttaaagatgaagagttagatcaattcacttctcaaatggataagatcattgaaatggcagaacaattgggagaagttgatactgaaggtgttcctgaaacaacacaagttgttgatcgcgatactgtttatcgtgaagataagccagaacactggcaagaccgcaaggaaatgcttaaaaatgttcccgaaactactgatggcttcattaaggtgccagtaattattgataaggacgataatgattaatgaaatacttaaacgaaactattgactctttaaaccaaaaattagctagcggtgaagttgacgctcaaaagttagctgatgaaacaatcgaaaatattaaggctactgataaagatatcaatgcttttattactgttgatgaagatgcaaaggccagtgaaaacttaaactttgctaataaattggcaggtattcctgttgcaattaaagataacattgtaactaacggtctaaaaactactgcagcaagtcatatcttggataactttattccagtatatgatgctactgtagtatctaagcttaaagatgctggagcaaccattatcggtaagaccaacttagatgaatttgcaatgggttcaagtaatgaaaactcatactttggtgcagttcataacccttggaatttggataaagttcctggtggttcatcaggtggttctgcagcagctgttgctagtggtgaagttgtggcagctcttggttcagatacaggtggttcaattcgtcaaccagcagctttcaacggtatttttggtattaagccaacttacggccgagtatcacgttggggcttgattgcttttgcttcatcacttgaccaaattggtgttttaactaagcgtgttaaggatgcagctgaagtcttaaatgtcattagtggtgcagatgaacatgattcaactgtttctgaaaaagctgtacctgactttactaaggcattaggtcaagacgttaaaggcttgcgtgttgctgttcctaaggaatacatgagtgatgctgtcgatgaaggtgttcgcaaggcagttcaagctcaaattgattaccttaaggaaaatggtgcaattattaatgaagtttcacttcctcataccaagtatgtagtgccaacttactacatcattgcttccagtgaagctagttcaaaccttcaaagatatgatggtattcgttacggttaccgtgctaaagatactaagaacttgcttgatgtatacgttaagtctcgttcagaaggttttggtgaagaagttaagcgtcggattatgttaggttcatttgccttatctgctggttcatatgataagttcttcagacaagcaagtaaggttagaactttaatttgccgcgactttgataagatctttgaagataatgatgtaattgttggcccaacaactactgaaccagcatttgaaattggttcagaagttaaggacccaattaagatgtacaataacgatattttgactatttctgcaaatatgtctggtgttccagctgctagtgttcctgcaggtttagttgatgggatgcctgttggtttacaaattatggctaagagattcgatgaagaatctgttttccgtgttgctgactttattgaacgtaacaacaagttttatgaaaagaaaccagctggattggaggattaattaatgaattttaaatcaactatcggtcttgaagttcactttgagttaaaaacaaagagtaagattttctctccatcaccagtaacttatggtgcagaacctaactcagaagctaatgttattgattggggttacccaggtgtattacctaagcttaacaaggaagtttaccgtcttggtttgatggttgccttagctactcactcagaaatcacaccagttactcactttgaccgtaagaactactactacccagataacccaaaggcttaccaaatcactcaattctttgaaccacttgctagaaatggttatgttgaaatagaagtacgtggtaagaagaaacgtatcggtattcacgaaatgcacatcgaagaagatgctggtaagaacactcacggaactaacggattttcatacgttgacttaaaccgtcaaggtgttccacttcttgaagttgtttctgaacctgatatggaagatcctgaagaagcatatgcataccttgaaaagttacgtaagattgttcaatttactggtgcttctgacgttaagatggaagaaggatcaatgcgtgttgacactaacatctcaattcgtccagctggtcaaaaagaattaggtactaaggtcgaaatgaagaaccttaactcatttgaacacgtacgtttatcacttgcatacgaagaaaagcgtcaacaagaagtacttttgtcaggtggtaaggttcaactttcaactcgtcgttttgacgaaaatagtggtaagactgtgcttgagcgtgttaaagaaggtgacgcagactaccgttacttcccagaaccagatattgcgccataccacattaagcaagactggattgatgaaattaagacccaacttcctaagagtgctgatgaacgtcgtgaagactacatcaataagttaggacttaagccatacgatgctgacgttattttgcaaacaaaggaagctagtgacttctttgataaagcaatgaaagctggtgcagatccacaaatgactgctaactggatgaacacgcaagttaatggataccttaacgaacatcacgttgaacttaaggacattaaactaactccagaaaacttggctaagatggtaaccttaattaaagatggagttatttcatctaagattgctaagaaagtctttgctgaaactgttgccaacggtactgatcctaagaagtacgttgaagaaaatggtatggcacaactttcagatctttcagttcttgaaccaatggttaaagaaattgtggataataacccacaatctgttgaagactttaagaatggtaaggacagagcaattggtttcttagttggtcaaatcatgaagcaaacacatggtaaagctaaccctaagattattaaccaattacttaataaggaattacaaagtcgttaatttacttactaacaaaagaaaaaaggtgttttaaatgattaagaaagcaagattgatatataatcctgtttcaggtcacgaacagatgcctaaaaatgttgcagatattttaaatatcgttgaacaagcaggctatgaagcaagtgcttatcgcacaactccagaagctttttctgctcaacatgaagctactcgcgtcgctaaagctggttttgatttaatcattgctgctggtggcgatggaacgataaatgaagtagtgaatggtgttgcaggacttagccaacgccccaaattagcaattattccagcagggacaactaatgattttgctagagctttgcgaattccacgtgataatttagttgaagctgcaaaagtaattttgcagggaaaaactagaaaaatggatgttggtcaagcaataagcgataatgaagataaatactttgtcaacattgcgggatcaggttcattgactgagttgacatatggagttccatcagagttaaaaagtgcaatgggatatggagcctatttgattaaaggagctgaaatgcttcctagcataagtaaaagtcatatgaaattaagttatgataatggcgtttatgatggcgatttgtccatgtttttacttggaatgactaattcgattggtggctttgaacaaataatgccggatgctgaattaagtgatgggctttttcagttaattgtgattaagactgcagatcctttggcgttgttatcattaatggtaatggccctaaatggaaagcacgttaatgatccaaatattatttatacaaaaacacgatctttaaaagtagaaatgattgataatggtaaaaaagttccgtttaacctagatggtgaaattggtggttatttacctgttactttcaaaaatctgaaacaacatattgaattttacgttggtaaataaagctaacaaaaatgacctagctcagatgcgagctaggtcatttttaattatcaaaactaattttgataaaaagtttctgcgactgcgtgtgcaattgcaatcttaacatgttcatatgaaagtccaccttgaatgtaaagacgatatggtggacgaagtggtccatctgaagatagttcgattgtggatccttcagtgaaacttccagatgccattaccacatcatcttcatagccatcttggtggtatggaattggatcaacgaatgaattgagtggagagtagtgttgaattgcaccacagaatttaaccattggttctggcttaccaaaagttacagtttgaacgatatctgttcttggatcattccatttaggagcaacatccattcccatttcttcacataaggcagctgtaaaaatcatacccttgattgcttgtccggtagtatgagctgccatgaaaaatccttggtacatatcacgtaagtagccccaagtagccccttcacctttaccggctccaggaacattaagacgtgaaccagcaccttcaattaaatctttacgtccaactaagaaggcaccgcctttaacaattccggcaccggcgtttttaaatagtgagccagcaattaagtcagcaccgtaaaaagtaggttcttcacattcagaaaattcgccataacagttatcaacaaagatatttacatctggacgaacttctttgataaacttaagcattttcttgatttttttcatggtaaagcttgcgcgaacggcataaccaagtgagcgttgaatagcaattactttaatcttagggtcttgcaagtccttcttagcttgttcaaaatcaacctcaccattttcaagtaattcagttgccttaaagttaatgccccattctttcatgttgccaggcttgtttccagctaaaccaataacttcttgaatagtatcataaggagtaccagtcaagtagtataaagtatcaccaggtcgaagcatactgaataaaccaacagcgatagcttgagtggcggaagaaaattgtgaacgaacaagggcatcatcagctttaaagtaatcagcataaattgcttctaacttgtcacggccaatgtcatcataaccgtatcctgtagaaggtactaagtcctcttcaccaacgcgatgttttctaaataattctaatactctttgttggttgtgaagaatttgttcatcaatttcggccaagcgtggagtaatcatttgatccactttatcaatctttacttgtaattcttcgggtaaatttgctttccaagataaaaccatatctatctccttattttaaaacttcaacttcaacattaattttaccatttgatgcttgtttccagtagacaccttgaatttctggaacaaaacctgggaagttttccattgctccaactaaaacttcaaaataattttgatcaactttttgccatttttcaccaggagcaacaatgaagacacctggtggataaggcaaggcgccttcagcagccacttcgccaacaacatcttttaaattaactaatttgctttcattgtgcataaagagattgtcagcctcagccggaatcatggtgtagctttgcatgttttctttttcaaatagtgctttttgtagtttaaaagtttgatgactagcgtaatatttatgcatttcattgcagagcttttgtaaggtgtagccttgataacgtttaggatattgcatagctaattttggcacaactttttctagaggagcatcttctaagtagagcttttcaaattctaaaaaggcatttaccagagcatctaaatcttcttgtcgatcacctggagttaataagaagagtagcgaatttaaatcattttttgctctgataattcttttttccattaaaaattcggcaacaactggaccgggaattccatctgcttggtatttgctattaggaatatcgattcctggtgtaattacagtgattttcattggatcaagcatcgcttcgttagcagcaatgcggttaaagccatgccaagaagcattaggtgaaagattccaatatttactgttagtcattaagtcttctgttggaatcttagcaaaattatcacaaactaagggcttaaataacttagatttagctaatagctgtttgcgcaattcaattcccatgcgtaaagtgtcattccaccattttttatttccagggccactgactaggtaagtattagcaactagagaagcatagataggataagaataacttgaagtgacaaattttaagtaggcatggttgaagtgcttgtggtcaacatagcgctcttgtcccttaatgtgactgtctttttttaagatttgggaagtttgcgccataccagcttgctgcttatgaagtgattgtgtaactaagattcctggatcttctggacctaagtctaaaaggaggggcgataagtgttccataatgggtagaaactcttcaaaaccgccccaagcacagtcaaagagaatgtaatcgcagagattaccaatcttgtctacaatccacttagcatcataaaagacaccatcataagtttctgcttgaactacagccattctaaatggtcgctttttcttagctttttctgggtcgattttagcggcttctttacgtaaatagtctgcagttaagcattcaggatccatttcaccaattaaaccaagtgggttacgatctgtcttaatatatactggcttagctccgctcatcactaaggcactattataaagagacttgtgattattgcggtcaaacagaactaggtcatcttttcttaaaacagcgcttgcacaaattgagttagcgctcgttgtaccgttagtacagaagtagactttgtcagcgtgataagtttcggcggccttttgttcagctgttagtggggaaccatcatgagtcatcatgtcacctagttcaggaactgtgtcactcgtatcagcatacattaagttcttaccgaagaatttattcatgattacaccagcaggatgcttttcataatataaaccgttgtggtgcccaggagtagtgaagctaaccggcttatctttagcgaacttgactaagtcctgaagataagttggaactgtttctgtcacgtagttatttgcagctgaaaggattttctttcgctcgctatcagtaatttcatttttaactttaataactggaatcggtaagccagattcactttttattttttctatcctagaaatagcagcagtattatttttacttactacaaaggctgcaatactagctggattagaaatattagttagtgaaattagttgccagttgggtagagactcaagctttgtacttgagtcaactgcaatatttaagaaatccataaaccctcccgagaaaaaattctctaaactattgcaattttaaaaaaaaagcatataatctaatgaacgtatattattatctataatgtgattatataagtagagcgagggtagaacaagtgggagtaactggttctttcattgttttaaagccaccaaataattcgtttaagttgtaataataggattaatttgggagagaaaaattgaaagaagacgtaataaatttagatttaaataaaaagcattatcttacttggccagttatcgctttgattgactttgtaacgattatcagttttgaaaatattttttatccattccaaaaccaaggactttcagttgtaatttcttggattttcttactattttcttatgttattccttatgctttgatttcaagtcaaatgagtttaacctttgataatcaagaaggtggactggcatcttgggttagaagaagtagtaatgatactttaggatattggacttcatggatgtactgggttcaaagtgttccttatattgttgacgtatcaaactcagtaattgtttcattcagttggattatttttggtgataattcacttgataagaaaatgtcgactttttggtttggaatgttaacttttgtcattattttggcatttatcttattagaaaaccgcttgagaaattctttagaaattctatctctaattggtggtggtgcaatgtttattatgtcaatgctctttgtagcacttgctgcttgggctgttatgaatggtggacacaagattgcaactcaaccatttaactggggtgcatttaagccaagctttagtttgaattacttctcaacaactggtttgcttatttttgctatgtcaggggcagaacttgctgcaccatatgtatcacaaatgaagaatccaaaacgcgacttccctaaggcaatgtggatgttagcaattatgacaggattcttaactatctttggtactttggctttagcaatgttctttaatgcgcatcacattccacatgactttaagatgaatggtccttactatgctttccgtttattaggtgaaagtttaggtatgggtaaagttttgatgtacatttttgctgttgtgcaagcaatcttcatgatggctcaattagcggtcttgcttgatgcttcaagtagagtctttgctggggatgttgctgataagtttatgcctaaatggttaactaagaagaataagaatggtcgaccaattcacagttacacttttactgttggtttgagtttattcttattgcttttaaccggtactttgcctaacattaacactatttataactggcttttgaacattaatggtatcatttcaccatacaagacttgttgggtattctttgccttcgttgcaatgagaatgcatcaagaaaagtacaagtcagattatgtctttattaagaatagaactggtgctttagcagttggtttttggtgcttaatcttcacctttatctgtgctactttaggatttgttcctcaaaacgttgattttggtacagctgaatttaaccaccaattaatattgaatataattactgtaattgtgttatttggtcttggttacatcttgccatggatgcgtaagcgtgaaaaaaagcgcgaagaaaataaataataacaattggtaaaatttataaaaaatggtaaataaaatcaagtttttcaatttagtgaagcttgatttttttattttggcgtcaaatatattaagataaaactcaaatacttttagataaaggatttgaggaatatatggagaaaaagcaacgaataattatcttttttagtttgcttttgatattatttgcgagcttaagcctaatttttgggttaaaacaaacgagtaaaagtccgctgcctaatgctacagctactgtatttttccacggctatggctcaagtaaacatgccgaagagcagatggctaattatttagttaagcataaatacgcttcttcaattgtagtagctgatgttgattttcaaggaaaagtaaagtttactggaaatttagctgcaaaaactaagaattttatcgttgaagtaaatttacaaaataataaaagtgccaataatatgacttatagtcaatcaagtaattatgtagcaaaggttttatctggtttaaagaaaaaatggaaaataaataatgttaacttagttgcccattcaatgggtaatttacaggtgatttattttattaagaatcatggagatagcaaaaagtatcctaaaattaataagttagttgcaattgctggccactataatggaatcattgggatggatgagccaaaagaaactaatctagaggctaatggtaaaccaaagatgatgaatgatacttatcgtgatttattatcggtgagaaatacttcccctaaaaacatcaaggtcatgaatatttatggtaattataaaaatcatggtgatggatccgtaaataataattcgtctaagtcattacgatatttagttcaaaaacgtgctaagtcctatgaagagcaagaaattcggggttatggtgcacaacacagccgacttcatgaaaataaagaagtcgatcaaatacttctgaaattcttaaagtagttatataaacagaaaaaatccgctagaacagttagttctaacggattttgttttattgataattattagcgacgatcgttaacaccgaagatttctagtaagagcataaataagttgatgaaatcaagatacatatttaatgcacccataatggctaagccactatcagaaacttgatcaccatattcaataaaaattctctttgcgctgttagcatcatatgcagtccagccagtgaagataagtacaccaatgtaagaaaaaatataagcgcccgcaccactcttaacgaagaaaatgttaactagggttgctacaatgaacccaatcatggcagctcttaagtatgagccccagctacttaaatcttttttagtaaaagtaccaaataaagccatcgctgcgaatacacctgctgcagatagaaaagcagaagtaatagttgtaccagtatagtagctagcaatgatagaaaattcaacaccgtaaactactgataggaacattagtaatgtaaaacctaatgtaggattttttgctgctttaaaactaattcctaagcaaagagcaaaaggtagaaaaataataacccagaacatggcttgtggcatgttcataatggctgagcgaaaaacagtcattgttaagtatgaactaacagctgaaactaagacagctattaacataaagccgtacatcttagttaagaagctattaatagcagtgacgtcttgaattttacgtcgtccagaatcttgtgagaagtaatccatataaaagttcctttctatagttaattactatattcaccactaattgtatccaaaaaagtgattttagacaaagaattggcacaaattagtaaagttataataatcaaaaaaagcctaacattaatgaagtgtctcataatgttagacttttaaatatttatttcttactccacttaagtccaattccagtgaatccactcaagattgagaagataggtgataaaagactaaagaaagtaaatggtaagaaggctaaaacaggaactcctaatgtagcagctgcaaatgaaccagcaacaccccaaggaatcaagtagttaattacactaccaccatcttcaagtacccggcttagggcaagtgggtgtaggcctactttatcaaaggcatctttaaaagcacgacctggtaaaattactgataagtattgttcaccaacgaataagttaataccaattccagagagaatagtgactaaaattaagctccctgtctttggtagacgtttaacaagaggttgcattgccttttggataatgccaaatttcattaataatccaccaagagataaggtggaaatgattaaagcaactgttgccatcattgaactgattccaccacgggttaaaagtgcattaacttgggcgttgtcagtttttgcaataaaaccattagttagtaaatcagttaactttggaatggtcattttgctatcttgaataaatatcatgatggttgtcaaaatgatattagaaaataaagttggaattgctgggatttttttccaagcacagataaacattaataagattggaagaagtgcccaccaagaaatagaaaagttgtggttcaaggttgcaatagttctattgattttagttaaatcgatgtgcccactattacctaaaattgtaaataaaattagagagcctaaaaaagcaggaattgtcgaccacatcatatttttaatgtgggcaaataattcactttcagcaacagcactagataagttagttgaatcagaaagtggtgacattttatcgccaaacactgcaccggagacaattgctccagcaattaaggctagattttggcccattgatgctccaattcctaaaaaggcaattccgattgttgaaatagtagtaaaacctgaaccaatagctagtccgacaattgaacaaacgataaagactgatggaacaaaaaattgcccgctaatcaaatgaaagccaaggaccataattgatggaataataccacctttaatccaaacagcaatcaaagctccaattaaaataaagataaagatgggaatgatagcaatatttattccttctttgattccgtcatgaatatcatcccaagaaaatccgcgcaattttgcccaaaaaacgattaacgctgcgacaaataatacgggaacttcaggatttattccaaatttaattacactaattcctaaaatagctagtaatagaattaaaataataattgattctccaaaaccaattttctttttcataatttttcctccaataaaaaagtccctgctgctattaaagcaacagggacgacgcttgccgtggtaccacccaatttctccgtcagtaacggactcaagtagcaggtgataaaggacctgcaagacctattagcaaattaagtatttcgttaaacttagcctgtccggcttgcaccaaccgccggttctctgaacgctgaactaagcaactactgttttattaattgaaattataatatattggactgaattaaatgtcaaataaaaagttaaaaaaagatgatattttgttaacgagcaatagagttaattttctagtatcatagtagtagcgattttagaaaaggtagatatcatgcaaaaaaatcaacttgttaaacttgaaataactgatctctcttatgaagcgatgggagttgcccatttagatgggatgacgatttttgttaataatgctttgccaggtgaagtagttgaagctaaaatcttgaaagtaaaaaagagttttgcttttgctaagattgaaaaacttatcaagcaaagtcctgatcgagtaacaattaagctgaatcaatgggttcaaacagggcttgctagtttagctcatattaagtatgataagcaacttgactttaagcgtcagcaagttatcaacttactggaaaaagcgcacttgaataaaaaagtaaatgctactgtggctagtccagaagaaacaggctaccgtaataaggcccaagtgccagtacggaaagtaaaaggtcaacttgaaatcggctttttccggaagcattcccacgatttagttccaatggagaacttctttaccactgatccagaaattgaccgagtgttggtagcaacacgcgatattttgcgcaaaaatcatataccagcttatgacgaagttaaaaataaaggtgaagttcgctatcttgaggtgcgtagaagtaaggctaatggcgaaatgatggtcatcctagtatgtttacacaaggactttccacaacttgccaaggtagctgatgaaattagtcaaatttcagacgttgttagtgtaattttgaatcataatccgaagaaaacgaacgttattttggggaaacatgactatttactctcaggaaatccacaaattgaggataaaattggggatgtgtgctttaagatttctgctcaaagcttcttccaaattaattctttgcaaacaccgcgtctttataatttagcaattgaaaaagctggcttaactagcgatgatacagtgattgatgcttattcagggattgggacaattggcttgagtgttgctaagcatgttaagagcgttcgcggagttgaaattgttaaacctgcggtgcaagatgctaaagaaaatgcattgctcaatggaattgagaatgctgattatgtgtgtggcaaggcagaagaattgatgccatcttgggtaagtgaagggatgaaggcggatgttatctttgttgatccaccaagaaaagggttgacacttgaatttatcgaagctagtgtgaaaactaacccacaaaaaattgtgtatatctcatgtaacccagcaacaatggtgcgtgatttaacaatgtatcaagacttaggttacgactttgaagaaattacaccagttgatatgttcccacaaactccgcatgtagaatgtgtgactgtgcttgagaagaaataaaaaacaagtccagctggacttattttttatttaattagtgaggtaactgccatgtcatctatcctttaaatgtagcatcaattcttgattttcagaaaaaagttctttaattaaagtttgattctcaatgctaatttgaagagttttatttttgtcttttgttaattgtaagcttaaagagtcacttgacttaaaatatctggattcatcttttaaatttgacatgaaatcacctggtaagtaattattataataatcgcctactagaagtaatccatgaaaagtataagccattgaagattggaataaatacaaatgtatactaaaacaaaacaaaagcaagttgaagatgttctcttaactcaaattgtagttacatcagaagtaaataatatttttaaatataatgacaaaatatattcaagtcaatcatatgaatcaggtctcgatcctgatatgtcggattttgctatagctttctatgaaattatttacaacaaaaaaattataagtaacggtcagattattgatatgaactttgctggggatactattaatactggtatttatatgaaaggccaaagaaaaaaggtaaagttagaaaaccggcattgcttagctaatttttgggtaattccctatgtccatggaagaaaaagggaaaaaccaaaaagagattattgggacttatatttatcctatgttaaagaaaatatatctgcttatgataaaaattttgagcagaatcatgattttaaagactttaaagtgactcaatttattcctgaaaatgttaattccagtacattaatgcatcaagaaatatcaataaaaaatagagctaagttattagcaaaatcagatgttggtgataaattatggctttattttgctgacaattctcttttataaaataggtgataaagatgaaccgaacagaattatttaattacatcaaacaaacttatcaaactcatcctgagtatttatggaaaaagttccctaactatgcagtttttcgtcaccaaagtaacaataaatggtatgcaattgttatgggtgttgaaaagagtaaattaggtctagatggtgatgaaaaaattgatattcttgatatcaaaatagatcctaagcaagctgaatttttattagaattacctggtttcttgccaggttatcacatgaatcatcgaacttggttgactgttttgcttgatggaacggtacctgatgagcaaattgctaagctattagcagctagttttcaagcgactaaaaaataattgatattaaaatagagagttaacattaacaaaataaaactccacaattattagattctatatctaacaattgtggagttttttaaatcataattgaatatttaaagctgtttcttttgatgctttttaataatcaaatattcactaatcatgactataaaccctaatacgctaattactatgcccaattttaagcctggcattgtatgctttaaagtaattttatgctttccttttggtaaatctaaagcgataaatctatttaaagcttttccaacttttacaggctttccatcactaaacgctttccagccagtagtgtatgggatagttgtaattaaagattgaccttgtttgatattgatagttccttcaacttgattatttgtccatttggataattttaattgattcttttgtgcataagaaattgtcttattaagagattgtttattgagtaagtaaagttgtggaataaaaagattacctttttcatttctttctcccatttgaaattttagagtaaccttaccatttttagggactgaaattccaagtggttgataagttacagagtttatgtttagtagctgattatttaaggttatcttgaaaattttagaataattataaagttgattattatctaaaacaatataaccaacagaatttggcttagcagtataagtgaaagtaacagacgatggagtagctttcttttttacttgataacttaattgttttttagatgttttcgtaattaagttgtcacttgtgacttgtgcggtgattggtttggagaaatatgtatgctttgagttagtgagtgaatttaagactctggtttgattctcaagagggtggtcggcagttaatcgtaaattattggctttatatcctgcaaaagcaattggaaaagtattacatttatacgcaacattttgcttattttttagccaaattttattattagctaaatcgttacgtaagccataatttttgaagccttcagtataaccagttaatcgattagtagttataaacgctttgatatcaaaaagagcgtcagtaagttgtgtactagaaaagtagaagtagaaataaccatctcctggtaagcctaataatgaataaaattcactaattttaggatcattgtttgatgagaaaacctcggctccacgataattaaaaatataactctcgccacaattatcatttagtaagaaacttttagctaaccgatccgttttagctgatttaggtaactgattaatgaaagattgagtttgagcaatataatcagttattttaaccgaaggctgtttaacattattccaaaaaattgttgctgatgaaaaaatttcaaatattaaaaatatagcaggaatccatgcatttattttatttttataataaataaatattaataaaccagatattattgaaaatacaaggaccaaaatacaatctgttgaattaagcaaaagtagcttgcttgatctaaaataataaattactaggaatatagcaaaaatagatatggatatttttaaattatttcttgaaatattgttggcaagttgataacttgcaaaaaatgcaataataaaagtaatcaaaaagctaaaacgatatgcaaaggctacgggtggttgtcctccatgccaaagtaaatagagtttctctgataataatccactagcagtaaaaatgcataaaaatagactggcaagtctagtcttgagagcaatccttccattaaaaaagaagcagattgccaaaaatagcgtaatagttcctacaaagcagagtggaagttgtaaacggagtggcaattgtaaacttcgagtagaaaataatacactagctggtagttcttgccatatgtgaaagaagttaatgttaggattagggagcgaataattgagcttgttttccaataaattaaaagcagttggtataatgctgacaccagagatggcgccagcggttaaagaagctaaaataaaaagactagaatttttaattaattcttttaaagtagatgtgtttaagtatacttgatacgcaaaaaaagcaactaagaataaacaaaccatgtaggctgtatagtagttagctacaatagtaattgcaagaagccaaatataaggaaaactaaaacggcctttgcttaattgaacgacaaaaactactaataaaggtagaaaagcaatggcatcaagccacattaaattccctatataattaattacataggatgatagtgagtacgcaatagctaaactaatggcccaaggatcagctaagtgatgaagtttttttgtcatccagcaaaaactagcactagcaaccataactttaagtaggattacggtatataaggcttgtggcaaaaacttagttggaaaaagtaggacaataaaattaaagaggctaagaagataataaccccagttacctgcggtattaccgcctaaaccattagaaaagctaaatgaaatactagataaatcatgaagtatggtatgttgataggacgcaaaaaaggatatatattgattaatcaaatcaccagaatgaatagttccacccattaggaaattagtgccgccaatccagctagcaataaaaaatataagaccagcaagaaagccggcaaaaatccaagttctttttttcataaaataaaaacctctataaagtaatgaatatactagtacattctaacatgtaagtaatagcttttatatgaagagttttaaggagaataaaaagccatactcaataatggagcatgactttttatttatccaaaattatctaaatcgttaacagcttgttcccaatcattagttgcttgatcaagttcagcttgaatttttgaaagatcttcttgaagtggccctaatttatcgaaattagaagcaatttcaggattggccatttcattttgaatgtcagcttctttttgctctaattcatcgatcttagcttctaaatcatcaacttttctttgtaattttcgcttttgtgaatcaagctttttttgttcctgataagataacttattttcactaacttttgtttcagttttagcggcttgttctggtatttggttaacaggtttatttttctcttctagataatattcataattaccttcatacagcttcgcatggccagctcgaactgaaataatcttattagctaattgattaataaagtaacggtcgtgagatacaaataaaagtgttccatcgaacttactcaaagcttgttcaagcacttcttttgcttcaatatctaagtggttagtaggttcgtccatgattaaaaaattatcatgctctaaggccaaaaccgttaaagttaaccgagctctttgaccacctgataattgaccaaccaccttgtcaatgtctttagctgtaaaaagaaaacttgctaaaattgagcgaacatctttttctggcatcgatttatggcgatcccagattgtatcaattaccgtcttcttataatcgagtccttgcagttcttggtcgtagtatccgatatctaaactagccccatacttaattgaaccagatttaattgcgagttttttcataatggtcttaagtaaagtagacttaccaattccatttgggccaataattgcgatacggtcgcctttattaacttggaaagaaatattattaaccatggttttgtcaggatagccaatagttaaatcttgcgcaattagcacttcttttcctgaagggcgatcagctttaaagttaatcttgaccttaccactatgcttaggtggatcaattcgctccattttttctagctgcttacgtcgactttgagcacgcttagttgtggaagcgcgaactaaattcttttgaatgaagtcttcagcagctttgatttcttcttgttgcttttcataagcagcttcttgttgcgcatcacgtaactggcgttcagctaaataatgagtataatcgcctttgaaaattgtcaatttaccataacgcatttcaaaaatttgtgttgccaaatgatccaagaagtattggtcgtgagatacagttaagatggcaccatcgtaatttttcaaaaagccttcaagccaatccaaggtgtctaagtcaaggtaattggtaggttcatcaagcaaaagtaagtcaggctttttaagaagtaacttaacaaagctaagtctggtcttttcaccaccagatagtgagccaattttctttgtccaggtattttctttaaagttaaaaccatttaggacgctttttatatcagcttgatatgtatagccaccattttgttcaaaatcaaattgcatttgatcatagcgtttgagtaagtcgctatcttcaggatgattagcaatctgttcttgcattttggttaaattctcaccttgcttgataagaggtgcaaaaacagtaatcatttcgtcccaaatacttttattttcatctaaagcattttcctgggcaatatagccaacatcgatatctttattgaccgtaaattcacctttagttgattcttcttcaccagtcataattttcagaagcgtggtttttcctactccattaggtcccactagaccgattctggcattattttcaattgaaaaattaatatctttaaataaagttgttgccccaaattgtttttcaagggcatgtccttgtgcaataatcatataattcacctgtgcaatattttaccataggaaatgtgaagatttcacttacttgttatactcaagattaaatttgtgaaaatattacttgcatataaaccttaagtgtaggtatcatattcttgattgaaaaattttcacattcacaaacttgaatgaagaagggttctttgatggataaaataaaaattccaaaggcaacagcgcgtagattgccactatattatcgttacttaattttattgaatgaagaaggaaaagaaaaagtatcctcaactgaactctcagaagcagttcaagttgatagtgcttctattagacgtgacttttcatattttggtgcattaggtaaacgtggctatggctatgatgtcaaaagtttattgggatttttcaaaaagatcttgaatcaagacactttaactaatgttgctttaataggggtagggaatttgggccatgcccttcttaactataactttaagcgtagtaataatattagaatctcttgcgcattcgatataaattcagatttaactggcaagattgttagcggtgtgccagtttatgatatgaaagatatgattgaacaaattagagagcaacagattaccatcgcaatattaacagttcctcaaacaaatgcccaaaaaactgctaatgaaattgttgaggcaggagtaagaggaattatgaactttactcctgttcgcttgtcagctcctgcaggagttagaattcagaatgttgatttggcaactgaattgcaaactttggtctactttttagaatcagataaaaaaattgaagattaagcaaattaatggtattacttgcttaattaactaaataggctctttgtcaaatcctgttgataaagagtgatttaaaaaatcaagcaatatataaattgcttggttctttttctttaactttgttttcttctaatctaattcttgttagtaagttaatgtaatttgagtaaccataagcagtacgctcaatctgtttaatcttacgattgaaaccttctaaacaaccattagagtagctgaatctagcaccatttaagactgctcgtaagttatgcttaaaggtcaataaagtcttgtgcatcaaagtgccaacctcagctttagaattaattatttctttcaaagaattagtatctctagctttaagagcagccataaagtcttgcattaaattatacgcattatctagccttggatcacaactaataccttccattacaacttgttcttgagttagatagtctttgaagtgccaattataatgagggtgaatcttatctaaatcaacgaaagacttaagataaagcttccaaggtgatttgagcagttgatattgccttgctcgtttatcaaaagacttcatgactaaaactcttaaagaattaaaagagcgagttaacatctgtaccatatgaaaacgatcaatgataatttctgcattagggaaacaagctctaacaatattttgatagtaaaagtttaagtccatagaaacagttttgacgttagcacgagcactaggagagaatttatcaaagtatttaagtaaagactttttgtatcggtttctgaggatttgaaccacttcatgcttttgaccatcaagacaaataaagtgtagctttttatcgacgcctttaaattcatcaaaggctaagtgttcaggtaaatagttatagttatcaataaaacgatgagaacaagaagctaaaacgcgttgaacagtattaacagatagattattctcacgagcaatactagtcatagaacggtcctcagttaaagcagaaagaacctttcttttggcaggattagagatagaacaatatttattaactaacttagatttggccattgaacgagtattacaatctcggcagagaactctttgcttatttaacctgatgatcacaggactactagcattagaagtaataaatctaatattagtctgaagatgaccattatgaatcagattaacagaaccgcaaaaaggacaagcaggctgaataagagtagcttgaaagaccttatacttaataccgttaattaatttaaagaaatgagcattaaaagtgatattagggtcttggatatcgagtgaaaatttaatacaatcattgtaagaggacatagaaaaaccttcaatctattaaaatttgagtcgtgttgaattttattgtaagtagaggggctatggcctcttttttttgcaataaaaaacctgttaacagtttaactcaaataaactatcaacaggaaaaattatagaaccactaaatagcacctttttagcactcgaagcaaaaaggtgctattttttgcttgcatcgagaagaaaaacatattattataagcattgtaagttagcacttagaaattaagagtgctaaaaataaaattgataattaaacataggagggactaaacgtgttacaacctattggtgatcgcgtgatcgtaaaagttaaaaaagaagaagaagaaactgttggcggtatcgtccttgcttcaaatgctaaacaaaagccaactgaaggcgaagttgttgccgttggtaatggtctagttactagcgaaggtaaggttttgccaatgactgttaaggaaggcgaccgcgtagtatacgacaagtactctggcactaatgttaagtacgatggtgaagaatacttggtccttcatgaaaaagacattttagcaatcgtaaaataatttaactaagaattcaaactaagacgaaaaggagtcaggcgttatggcaaaagatattaaatttgatgaaaaagcaagacgctcacttttaaagggtgttgataagttagctgacactgttaagactacattaggacctaaggggcgcaacgttgttcttgaaaagagctatggtgcaccagaaattactaacgacggtgtaactattgctaaggcaattgaacttaaggaccacttcgaaaatatgggtgctaagcttgttagcgaagttgctcaaaagactaacgatattgctggtgacggtactactactgctactgttttaactcaagctatcgttaacgaaggtatgaagaacgtaactgctggtgctaacccagttggtattcgtcgcggtattgaaaaggcaactaaggctgctgttgatgaattacacaagattagccacaaggtttctggccgtgatgaaattgcccaagtagctagcgtatcaagtgcttcagaagaagtaggtaacttgattgctgacgctatggaaaaggttggtcacgatggtgttatctcaattgaagaatcaaagggtgttaacactgaactttcagtagttgaagggatgcaatttgatcgtggttacctttcacaatacatggtaactgacaacgataagatggaagcagaccttgataacccatacatcttgattactgataagaagatttctaacattcaagatatcttgccattacttcaagaaatcgtacaacaaggtaagtcattacttatcattgctgatgatgttgaaggtgaagcattaccaactcttgttttgaacaagattcgtggtactttcaacgttgttgcagttaaggctccaggctttggtgaccgtcgtaaggctcaattacaagatattgctgctttaactggtggtactgtaattaccgaagacttaggcttagaacttaaggacactaagattgatcaattaggtcaagctggtaaggtaactgtaactaaggattcaactactattgttgaaggtgctggtactaaggaagctatcgctgaaagagttgactcaattagaaaagaaattgaaaactcaactagtgacttcgacaaaaaaaagttacaagaacgtcttgctaaacttgctggcggtgttgcagtaatcaaggttggtgctgctactgaaaccgaattgaaggaacgtaagtacagaatcgaagatgccttgaactcaactcgtgctgcagttgaagaaggttacgttgctggtggtggtactgccttagtagacgttaagaaggcaatcactaagcttgctagcgacaatgaagatgaacaaactggtattaacatcgttttacgtgcacttagcgcaccagttcgtcaaatcgctgaaaacgctggtaaagatggttcagtaatcttagaccacttaatgagtgctaatccagaagttggttacaacgctgcaactgacaagtgggaaaacatggttagggccggaattattgacccaaccaaggtaactcgttcagctttacaaaatgctgcatcaatcgctgcattactcttaactactgaagctgtagttgctgaaattccagaagaaaagccagctgcacctgctaacccagctgcaggtatgggcggcatgatgtaaaaatctagcttataattttaaagctctaggacgtagaagttctagagctttttattttgcagaaaattttggcatttattttcgtatttatagatataaggaaaaatataggaggaaaatgaatgctagaagagcaaaagtactatggctttacaaatgatgagatttttggcagtattatgcaaaataaacgtttttgtaaggcgattattcaggcagctttgccagatgtcaatgttgtttcagttgaaagtatcgatgcccaaaaagaattgggtactaagagtgataagtcgagtaaatctgtcagacttgatatcgcagtcaaagaccaagcaggaagcttctacgatgtcgaagtgcaggtaaacaacaatcacgatattgggccacggatgcgatattatcagtcgtcgatggatagggatactttagatagaggcgaaccgtacacttcactcttgcgtacttatctgatattcttatgtgcttttgatccgtttggcaggggaaagctacggtatagttttcacttgtacgacgatgaagataaagacgtgaagcttgagaataatgcagaaaatattatcattaattccaaaggcagcgggagtagcgataccgatttgttaaatctccaaaagttgatgaacgatgataaaatagaggtaacaggagtttttaaagaaattcaaacacaaattcaagagtataatgatgatccaaaaaggagaaatcttatgagaacagcagaattacgaatgaaggaagaaactgcagtagctagaaaagaaggccgagaagaagagcaaagaaatacagtaaaagtcttcaaagccttgaaaccggatgcgacagtggctgaaggtctagcttggataaaagcaaacacagatgtctctctttcagatgaagaaataaaagctatcttgagcgaaaataactaatttcgccccaaaggaaaaatcttataaaaacagcaaagaaataaagattgctgaaaaatattccccaaaataaaaaactggtaagttagcccatgctgatttaccagctttttgtatacaattatcaggtgaaaaagatatcgtgatgatatacttaacttaaataccgggagggatagctatggaaattggggaagcattgaaaattacacgaaagaagttgaatctcagccaaagtgagatggcaggagatgttttaactaagtcctattattcgaagatagagcgcggaatccatgaaattaatgctcaagatttaattgatattcttaatttgcatggcattagaattcaggacttctttgaggaatttaattttgaaaaaaacaccttcggaaaaagtaactttgataatttacacaggttagtgggaaatgcttattatcaaaaagatactgatggacttttgaaagttattgatgcgatagataaattcccaaatagtcaaaataatcggctggctagggggctacgagtcgaagcaaaactactttatcaaggattaaaatatggcccagaaaagattgatgacgaaacaattaaagaagttaaacagctgatgtttaactcagataattgggatgagttgagtttgaatctgttgtcaatatcaattcctgttttaaaaatagaagaattaaattcaattattggatcactgattagcaagaaagcacctagtgcaacaagtattagagctaaagaaattatctcttcaatcttaataaatttcttagacaaagcgtataaatcttcatttttaaaaggtaaatcaataactctagcttttaaatggttagaacaagtggatccgtctttaaagaattattgctttttgaagatttataccaattattatcatgcgttgttatccggagaaaagaataaaactcagagaattcgtgaatttttagatgataatggcatggaagacttaacacgctatttggcaagataaaaagtgtcaatttcgacacttttttattttggttaaaatatatgatactattataaaaaaataaaattattaataaaaacggaggaagagccatgatctaccaaaactattcaaagttcaagttcttttggcttaacttttttggcttaatctatagtaccgaaaatattattatggcctacatggtcggtagcttaaccaatatggctactaagaaagaattctcagcattgcctcagctattcattcagctagtggtcatcttaacggcagtcttgatttctaatttaatttttaattatttgaaagctgacgcgattaaaactactaatgttaagcttaggactagcgtgcttaagggaatgcttactagcaagcacgaagatagtgcgaacttgggctttttgaccaatgacttcaagctccttgagactaatcgctatgaagctgagattcaaatcttgttctattcatatacagtcgtgctggctctaggctattcgctctacctcaactggatgctgacactggtcttcttagttggtgctagtctgccagcagttgtgtcaaacatcttccaaaagcaaattcaaactagctccgttgcctggactaaggccaatgataagtacgttaaccagactaagcacttgttagctgggactgaagttttcagtttattcaataaaagaaatgcagcagttgcgcaaaatcgggtcactgttgacaatcttgaagataagcttgccaagatgaacctagcgaaaaataataccaatgccttcttgaacattattgcaattggcggcaccttccttgtaccgtttgcaattggggtggtgctggttattcaaggccaaacaactcttggcgctttatttgcgattattcaattatcgaactccttcgttaacccaatcttgcaaattttgagtgaacggaataacttaacaaccaccaaggatatcgttgaaaaaattaagcagttgtcagctcaaagtcaaaaggctgaaaaagctgcaatttctgactttagtagcttagcagttaaagatgttaacttgagtcggcaaggtaataagttggcaaacggtattagctttaccttgaataaaggggaaaagcttgccgtcattggaccatcaggttcaggaaagtcgacgctactccaattcttgttatatggtgacttcgggagcgcaggtgaaattaagcttgatgatacagttgtgaaagctggtgcgtttagcaacttatttagttacgctagtcaaaaggcgattatctttcctgaaagtctttggtttaatctaaccttaggagctgatcttgcagaaagtgaagtaagagcagtgtgcgagcaacttgacttaggtgacttggttcgagagaagggctttgactatcagttaggtgataatgcggatcagctctcaggtgggcaactgtcaagaattggccttgcgcgggcgattttagctaagcggccagttttattattagatgaaattaacgcttcacttgataaaaagaccgcagctgatgttgaaaattacttgcttaattcagacttaaccttcattgaagttaaccaccactatgatagtgaaagcttggctaagtatgaccaagtggtggactttagtaagtatatgtaggaaatttaaataaaagaaaacggcctcagtcataggaatacctatgtgagaccgtttttttgttgcttaattattgagtcaaaccttgagtgttgttgacgcgatttacgtaagtcttaacttgggcatctgagtagtgttcagcaacgtagacgatgatttgcttaacgcttgcttggcctaaaatcttgtattcaggttcaagcggattttcaccaactgattggaagagctgaaccttgtcgccgctaacaaagtagccataagcagcttcagtttgttcagcggtaatggtgaattcagatctagacttgtccttatcatcagggccaccagagatgttgaggtagttggtcttgttactagtggttaaaatctggttgtaaaagctatttggcaacttgcctgcagcataaagtaagatgaaagcaccaaattgggctgagttgatagcctgcggattaaaggcttgacggtcgcctactgcttggctgagatcagcaaccttgtatttggttaaagcagcagctgctgggtcagttttcttggcagcttttgaagtgcttgagctagctttttgggtagattcagttgaagaattggtagccttcttctcaaccttgctggaactagcggtatctgcgtgatgtgtaatgatagctcttgtagagtgaaaagcatacaaaagtacgccaactacaataccaacaattagccacacttttttatttttagtattcatatattccctccatagtatctaactatagctcttattatagcggaaaattgggtgctgacaatgtgcagggatgtggtggagaagtgcgtgactgttgggatataattatatagaaagaaaatagtggaggtagcttatgaaaggatcagaaaaaagattaatttctctttatgacggctcaaatgtaagaatgattattccagtttatcaaagaaattacgattggactcgtgataactgtcgtcaattatttgatgatttagtgtcattaataaaaaacaatcgtcaaaatcatttctttggtagtgtagttgaaatgggtacgcaagaaggtataggagaagtctcaattattgatggacagcaacgaattactacagtgtatcttttaatgcttgcattagtaaagcttcttgaagaagaaaaaattacaagtgctgatccgcaattagcacgaagaataagagtaagctaccttgaagatgaatttcaaccagaagataaaaaattacgcttaaaacctgtaaagaatgatgaaatggcgttaaagcgactatttaaagatgaaaaagattatttattgagttctaatttaactaataactttagatatttttatgaaagaattttagatcaagaactaactgcggatgagttatttaaggctattcagaagttaatgattattgatatttctcttaagcaaggagaagatgacgctcaattaatttttgaaagtttaaattcaacgggactagatttgactgaagctgataaagttagaaactatgtcttgatgaaccagccagtaaaagttcaagaaagcttatatgaaaattattggaataagattgaagttaatacaaattatgaggtttctaatttcctaagaaattatctgacttttaatttgaagagagttcctaaaattcaaaaagtttatcttgaatttaaaaagtatagtgagaaaaatgattctgatatagaagaattacttagtgatttggaaagatattcagaaattaatcgtgatattagcaatgcttcaaccggagagcgagaagtagatgaagtattgcatagattaaatattttagatatgagagttattaagcccttcttattacctttgattaattattggaaattaaataagattgattttaaagcacttataggatcattgaaagtagtggaaacttttatttttagacgtacaatgtgttcattccctacaaatgccttaaataaaatttttgctactttatttagtgaaactattaagttgactaaccaaggaaatacagaatttttaccggttttaagttatattcttattaataaagcagatagttctagatatcctaaagattctgaatttttaaaatcatttgatgataaggatatctatgatatgaataaaaatgctcgaaaatatttatttgatagacttgaaaatcaagactcacgcgagcatgttaatgttgtagataatatgcaagatggaaattatacaattgaacatattatgccgcaaacattatctgattcatggaaaaatacattaggtagtgattataagaggatctatactcaatggataaataaattggccaatttaactttgactgcttacaacagtaagtattctaatcgaagctttattgaaaaaaagcatattgataatggttttgaccaaagtggttttagacttaatgactttttgaaaaattgtaatcaatggactgaaaaagaattacttgctagaaacgattacttaaaggaacttgctttgaaattatggccatatcctgaaactaattttcagcctaagcaacgtgaaaaagtaagtcgtacacttgatgaagattatgattttgcaggtactaagatagttagttatacatttaaaggaacaccttatcaagttaaatcttggattgaaatgtatgtaaatgtgattgaagcattatatgaaatagatccaactccactatataaggtaatagcaatgcatgctacaaagggatggaaatgttatttaagtggtactgaaaaaaatgaatttactaaagtagcagatgatttatatgtttatggaagaacaaatacatggaataaattgaatgtattgaataagctatttcaaatatacggaatagatccagcagaattggtctttgaaattaatgaaaagaaaataagaaataataattaaggaatttgagttagtgtaaaattcaaaagtaaagataatagaaagagacaaattatggcaagcaaatcaaatgacttaaaatttgaagataaattgtgggcagcgtgtgatgaattacgtggaagcatggatgcatcagaatatcggaatgttgttttagggttaatctttttaaagtatgtgtcagattcttttgaagaaaaaagacaagaacttttaaaatctgattatccagaagatgctgaagattcagatgcatatttagcagataatattttttgggttagtccggaagcaagatggaacaatattcaaaaagcagctaaaactccacaaatcggtgaagtaatagatcatgcaatggaatctattgaaaaagataatgaatcattgcgtggaattctgagtaaaaattatgaatcaccagatctagatagatctagattgggtggagtagtagatttaatttcagacattaatgtgggtggtaaagaggcaaaggaaagagatattcttggaagagtttatgaatatttcctacaaaaattcgctagtaatgaaaagaaaaatggtggagaattctatactccgagatcagtagttaaaactttggttgaaatggtagagccatttaagggaaccgtatatgatccttgctgtggttctggagggatgtttgtacaatcagaacaattcgttcaagaacaccaaggtcagattgctgacttgtcagtttatggacaagaatcaaatccaactacttggaaattagccaaattgaatcttgccattagaggtattgacaacaattttggggcgcatcaagcagatacttttactaacgacttgcataaaggaactcattttgactatattttggctaatccaccatttaacgttaaaaaatggggtggagaaaaattaaaagatgacccacgttggaaatatggtattccacctgaaggaaatgctaactatgcttggattgaacatattattagtaagcttaatccagatggaaaagcaggtttcgttttagctaatggagcattatcaaccacactcaaagaagaattagctattcgtaaaaatcttttagaagcagacaagattgatgcgattgttgctttaccagataagatgttctactcaactggaattcctgtttcattatggtttattgatatgaataagaattctgaagatgaacgggatcgtcgtggagaaactttattcattgatgctcgtgaattaggtgaaatggtagaccgaactcacagagaatttagcaatgaagatattaagaagattgctgatacttatcacgcatatcgtggaactaataaacaaaaatacgaagatgttgctggattttgtaagattgctaaattagatgaaattgctaaaaatgactatgtattaacgccaggacgttatgttggcttagctgaacaagaagatgatggtgaaccatatgaagttaagatggcgagattgactggtgaattgaagaagcaatttgaagagagtgatcgacttcaagatgagataaaggatgttttgaaggagttagggtatgaaatataaagttagtcaaatagccgagattaacagtaattctattaagcccaaattatactctggtgccttaaattatgaggatacgagttcagttactgataattgttttattagacctattagatatgacaatattactgaagcacctagtagggcaagaagaaaagcagctatcggagatactgtaatatcaacagtaaggcctaataatttgcattatggctttattgataaaaataactgtgattggatttatagtacaggttttgctgtagtgcatccagataaaaaaatagttgatccattctatttgtttttattattaagtcttaaatccacaacgcaaaaattgcaggatattggtgaaacatcaaaatctacatatccagcagtaaaaccagatgatattgccaacttacaatttgaaataccaagcttagaaaagcaaaagaaaattagttttattttcaagaatctatatcaaaaatctaaacttaacaatcagataaatgataatttagatgatttaatgacgacaatttttaataacaaaataatcaattcaaaatttgaagtttcatctttaacaaatattgcaaattataaaaacggattggcaatgcaaaaatttaggcctactgaaaattcagaaagtttaccagttttaaaaatacgtgaattaaaccaaggtagtaccgataataattcagatcgctgttcagctaatatagacccagaagttattgtaaatactggtgatattatattctcatggtctggtactttattagttaaaatatggtcaggaaataagtcaggcttaaatcaacatttatttaaagttacatctagcgaataccctaattggtttatttatgaatggactaaatttcatttacataagtttcaatcaattgctgctggcaaggctacgactatggggcatataaaaagaaatgacctaaaaagctcaaaagttctaatacctgataaagtatcattcgataaatttaataaaatcatgtctccaatttatgaaaaaaggttagaacttattaaagaaaatcaatctttaatgacatttaaagaaaatttattaactaaatacttctaagctactaaattatcatttatcctaacaaacaatatttgaaagaggtgaagtcatgaattcaattaaagaagaaagtatagaaaatgatgcccttgagtccctagaaaaacagggatatcaagttattaaaagtgaagtatacaatcatactagtaaaattatcgatgctgaaagaaataatgatcataccaagttcatccttgaacctagattgtctaaagtcttaaaagaattaaatccaggttattcagatgatatttatcgtcgtgctctgcatgaattttccaaattagctgataatccagatatgatgattaacaatcattacatgcacaagttgctgattgaaggtgtgaagataaagacatctgagaatggagaaaataagactgttactttgcatgtaatcgattttgataactggaaaaataatgactttttagctactaatcaatttgaaattgtacaaggtgaaaaaagccgtagaaccgatatcactgtatttgttaacggactgcctttaattacatttgaacttaaaaagcctgataatgaaaatattactgtaaaagaagcgtacgaacagttacaaacttataaagctgaaattccagactacatgaaatacaatgaaatcctaattgcttctgatggagttaatgctcgtgcaggttctttgactgcaggttttgatcgctttatgcgttggcgacaacctaaaaatgaattagtaccagaaggtagcctggaactcgatattttaattgagtatatgttgaagcctaaaaccttactcaatattattcaaaactttattatttttgagaccaatggtgatagtacggtaaaaatattaactgcataccatcaatactatatggttaataaagcagttgttgctgctgaacgtgctttgaaatctaatagtgataaaagaataggtgttgtttggcatactacaggatcaggaaaatctttatcgatggttttcttctcaggaattgttgctagaaaactaggtaatccaactattcttgtgattaatgatagaaatgatttagatgatcaattgtttggtacttttgctcaggctcatgaatatcttcaacaaacaccagatcatgcagaaaatcgtgatgaagttagagattatatgagccgtaattcaggtggaattgtctttagtacaattcaaaagttttctccagattttgaacgtggggaaaatgaaatgccagttttaactaatcgatctgatgtaattgttatggcagatgaagctcatagaactcaatatggtctgcaggctgaacttactaagaacggtgttagatatggttatgcaaaatatttgagggatgctttacctaatgcttcatttattggatttactggtactccaattgatacagcagataagtcaactgtagcaatttttggtaattatattgatgtatatgatataactcaatctgtagcagatcacgcaacagttaggatcttttatgaaagtcatataattcctttaaaacttaaatcaggctcagaagagaagtttaatgagttgatggatgagtatgatttaaataccgaagcttctgattcagaaaaagaagctcgaaataaagaattaactaagcttgaagctattgctggtgctaagcaaagattggaagctatagctaagcattttgtatctcattttgaagctcggcaaaaagaagagttcggtaaatctatgattgtcgaaatctctcgaatcaatgctgtcaaattatacaatgagattataaaattgcgtccaaattgggaaagttcagatatccacaaaggaaaaataaagatcgtaatgacctctagtccttcagatggcccagaacttgctaaacataatactagcaagcaagaccgtcgtattttacaacaacgtatgaaagacaactcagatgaacttcaaatagtaatagttgttgatatgtggctaactggatttgatgtacctagtttaaatactttgtatgttgataaacctatgaaaggtcataatttgatacaggcgatagctcgtgttaacagagtgttcaaaaataaagatagtggcttgattgttgactacattggtattgcggattctttaaaacttgcattaagtatttattctaaagatgacaaagatcaagtaggcattaatgtcgaaaaggttttggcactacttaaagataagtacaatatcattaaaaatgatttcttatacggaatagactattcgggcttcgattcgaaagatgatattgtaagaactaggacagttaataaggttgcaaatgagttaattgctgaagataaagacacaattcaaaagttttgtgatgtagtaacagagactcaaaagttatatgcattagtggcaattcagccagctgctcaagagattgggccagaaatagcattctttaggttagttaaagtatttatcatgaaattactttccaacaatgatgatcatgaaagaaagaacattgattatcgcttacgtcaaatgattgaccaatcaataattgctgaacctgaagtagatgtatataaatctttaggattggaaaagccaagattggatacaatttctccagagtttttgaagaaagttcagaacctaaatgaaaaatctttagcagttagaattttggagaaaattctacgaggacagattaaagtttgtttgcaaatgaacattgtgcaaggtaagaaatttcaagaaatgcttgaagcatcaattgctgaatataatagacgtgggataaacactgaaattgttattcgagagttgattgaaatggctcaaaaaattaatgctgaacaggaaaaaggtaaagatcttggtttaactccagaagaaattgctttctatgatgctttagcaaaccatgaaaaagctgtacaagttttaggtgaagaaaaattacatttaattgccaaagaactagtaaagacagtcaaggctaatgcaggtgttgattgggaacgaagagctgctgttcaagctaaaatgataatggctgttagacaccttttaagaaaatacgggtatccacctgatatttcagctgatgcaacgaaattggtggtttctcaagcaaaacaaatggcaattagacctatttaataaagtatatttagagtaaatttcttctgtaataccaaaatcttgataatcaaggatatattctttgaagtattaatattttttcgttctttttagtatgtaacttaaattatgttggagagattagtagtcaaacaaaacgccaattcggatgatgattataattattaagtaattaaagtgtgcaatgattattgcacgctttctttttgctataatagaatatagtaatttctttttgaggggacgcaattaaatggcagaaacaacacctatgatgaagcaatattacgacatcaagagtcagtatcctgatgcctttttgttctatcgtgtcggggacttttatgaactttttgaagatgatgcagttaagggtgcgcaaatcttagaattaaccttaacccaccgttcaaacaaaaccgaaaatccaattccaatggctggagttccccaccaagctgtggattcttatgtgaatactttagtggaaaaaggttataaggttgctctttgtgaacaacttgaagaccctaagcaagctaaagggatggttaagcgtggaatcattcagttagtaactccaggaaccatgatgaatgaaggtccgaatggtgctaaggaaagtaactatttaacttctgttttttccactaagagtggctttggcttagcatattctgacttatccactggggaaatcttcacgactcatttgaagagttttgctgatgtgctaaatgaattgctttctctgcgaactaaagaagtagtttttgaaggtagtctttctgatagtcaaaaggacgtcttaaaaaagagtaacattacagtttcaactcctattcaagaccaagaaaagcatgccgaagtttcctatgcaattcaaaagttaagtaatcaagctgaaaaagatgccactaagcagctagtaacttacttattagttactcaaaaaagaagcctagctcacttacagattgccaagagctatgaagtttcgcaatatttacaaatgtcccacgttgttcaaaataacctcgaattagtagccagtgccaagactggtaagaagatggggtcactattttggttacttgataagactaatactgcaatgggcgggcgtcttcttaagcagtggttagcgcggccccttctttcaattagcgaaattgaaaagcgccaaaagattgttcaagcaatgcttgataactactttattcgagaagctgtcaaggatgcactaaagggcgtttatgacttagagcgtttaactgggcgcattgcctttggtagtgctaatgcacgtgagcttttgcaattgtcacgttctttagatgcaattcctcagattcaaagtgccttatttgaaagtggcgatgaagatttagctaattttgcagatcaaattattgatttatcagagttagctaagaagattaaagatacaattgtggaaaatccaccaattttaactactgatggtggattgattcgtgaaggtatcaatgaacagcttgaccgttatcgtgatgcgatgaataatgggaagacctggcttgctcagcttcaggcacaagagcgcacggcgacagggattgaaaatttaaagattggctacaacaaggtctttggttactttatccaagtttcaaagggaaatattgccaaggtgccagaaggtcgctacattcgtaagcagactttaactgggtcagagcgctacattacgccagaacttaaagagcatgaaaatttaattttagaagctgaaaataagtcaacggatcttgaataccaaatcttttctgacttgcgtgaatacatcaagaccttcatccctaaattacaagaacttggtaacacaattgccagcttagatgctttgactagttttgcgacagttgcagaagaaaataattattgccgtccaagtttccaccaagatagtcaagaaattaaagtaattgcaggtcgtcaccccgtagttgaaaaagtgcttgctgacggcagctacatccccaacgacattcaaatggctgatgatactagcgttttcttaattacagggcctaacatgtcaggtaagagtacttacatgagacagatggctttaatagctgtaatggctcaagtaggctcatttgttccagcaactgaagcatctctgccaatttttgatcagatctttactagaattggggcagccgatgatttaattagtggacaatccacctttatggttgaaatgagcgaagctaatgaagccttgcaaaatgctactaagcgctcacttgtcctttttgatgagattggacgtggtactgcgacttatgacggaatggcgcttgcaggggctattgtgaagtacttacatgacaaggttggtgctaagactttatttgcgacacactatcatgaattaactgatatggaaaaaacactagatcatcttaagaatattcacgttggtgcaactcaagaaaatggcaagctaattttcttacataagattttgccaggaccagccgatcaatcatacggcattcacgttgctcaacttgctggcttacctaataaagtcttacgcgaagcaagcaaaatgctaaagaggcttgaagcgcaaggtgctaatgggcttgaaccagctagtttgcagctagatctttttagtgatagtagtgaaactgaagaaactactagtgatgaagccatctccgatactgaaaagcaagtaattgaagatattaataacttgtacttggctgataagacgccactagaagttatgcaattagtagcatcttggcaacaagatttaaaggatgaagactaatggcgaaaattcatgaattatcggaaactttaaccaaccagattgcggctggtgaagttattgaacgaccagctagtgtagttaaagaattagttgaaaatgcaattgatgctaaagctagtcaaattgagattgaatttattgatgctggtctaaaagaagtaatcgttcgcgataatggtagtggtattgcaagtgaagacttagacttagcctttcgccgtcatgctaccagcaaaataagcaaagaacgtgacctttttaagattgcaactctgggctttcgtggagaagcgttagcttcaattgttgctgtgtcacatacagaagtaataacgagtactgatggtattaaaggtgtgaaggctgaatttgctggtggggaaaagctaagcgaagaaactcatgctagtaccaagggaactgaaatcaaagttagtgatttgttctacaatacgccagctcggttgaaatatttaaagagtccacgaaccgaaacaatgaaaattgtggacattgtaaatcgtctagcacttggacatagtgagattgcctttaccttaaaaaatgaaggtaaactgcttttaaaaacgccaggtaataataacttacgccaagatttagcaaatatttatgggcgttttattgctaaagacatgattgaatttagtaaagaagacccagatttcaaggtaagtgggttattatctacgcctgagactacaagatcaaatcgaaattttgtatcgattttgctcaatgggcgttacattaagaattaccaattaactaaggcgattttagccggttatggtagtaaaattgctcaaggtcgctatccaatagctgttattttgattgagcttgacccatttttagttgatgtaaatgtgcaccccactaaagaacaagttagattatcaaaagaaaaagaacttagtcggctgattacagaaggaatttctactgctttattagaaaatactagtcaagtaagtgctttagcgaatttaaataaaaaagtagatagacaagaccaattagcttttaaccttaacaaaaatgtagttgatacaactcggacttatgaagagcagccagctaaagaagaaaagcaaatttctgatcaagaagtgagctatgttgacttaaatcaagttcgagaagatgatcgctatgttttaactgctagttgggataaaaatgtcgctattcaagtaagcctaacgccatttaccaaaaaagctaataagaaagaagataatttattaactaaaggtgatgaaaagattgcttattcattgccatatttaacttattgtggacaagtcggagcttatcttttagcaagtaatgaagatgatttatacttaattgatcaagttagtgctgagcgcgctttgaagtattgcgatattttaaagcaaatgcaggagacagattatcagcaaaccttactaacaccacttgttttagattttggtagtgaagattatttagaaattaagaatcacttatccgagcttagagagattgggttaattttagaagattttggtcaaaattcacttcttttgccaagttatccactttggctaaaagatgaatctgagcgcaatattcgtgaactgctggatttatttttaactagtaaaaaagacaatttagctggcattaaagctagtctagctaaagccgaagtaaaaaggcgagtgcgcaaagaaaagcttactaaagaaggcgcccaaagcatgctagaacaactagcgagtttagctgatccatattatgatccatttggacaactaattattgtcaaaattaccgatacggaacttgaccatatgtttaaaaaaggtgaataagaatgtatgaatatttagaaggaactgttacgatcattacgccaagtttcattgcattagatgtaggtggacaaggctttaagatttatagtgccaagccatatagttatagtgaaggccaacggattcgggtttatgttgagcaagttgtacgtgataatgacattagtttatatggctttgaaagtggcgatgaaaaacaattatttttgaagctccttagtgtaagtggaatcggacctaaaagtgccatggcaattatggctgctgaaagtagcgattcgcttgctaaggcgattgaaaatggagaagttaattacttaactaaattcccaggagttggaaaaaagactgcctcacaaattgtgcttgatttaaagggaaaattaggtagttatgttgaacaagatctatttactgctgatacctctcaagctcttagtgatgccttattagctttgtcagctttgggctatactaaaaaagaagtcgaaaaagttaagccaaaacttgaaaaatcaacttatgacacagctgatgagtatattaaagaaggacttaagctgttacttaagaaaaaatagccaataaaaatcaatttaaggaagtgaaatgatggacgaagatagcagagtggtagctggtgaagaagaacaagaagacttacaagatgaattaagtttacgtccccaatcttttagccaatacattggtcaaaaaagagttaaatctgaaatggagatttatattcaagcagctaagaaaagagatgaagcccttgatcacgtcttactttatggtccaccaggtttaggtaagacgactatggcctttgtaattgccaatgaattaggagttaatttaaaaaatacttctggtcccgcaattgagcgagctggtgatttagtagctttactttctgatcttgacccaggggatgttttgtttattgatgaaattcaccgtttggcaaagccaattgaagaaatcctttattcagcaatggaagattattatgttgatattgtagttggagaaggttcaacaagtcatgcagtgcatgtgccacttcctccgtttaccttaattggggctacaactagggctggtgacttatctgcgccattgagggatcgttttggaattgttgagcatatgcaatactacacaattggcgatttagaaaagattattcaacgctctagtgaagttttttccactaaaattggtaaagaagctgcccatgaattagctagaagaagtcggggaacgccaagagtagccaatcgacttttgaagcgagtaagagattatgcacaagttaaagaagaaaataaaatttctttggctacaaccaagtatgccttagatcaattgcaagttgataatgaagggctagatttaactgaccgcaagattttaagaacaattattgaagcttatcacggtggaccagttggaattagaactttggcagcaaatattggagaagatacagacacaattgaagccgtttatgagccatatttgcttcagcataagtttattacgatgacaccgcgtggtcgggtagccactcagaaagcttatttgcaactggggataccacttcctgaagaaagttaaagttaatttctagtaaagtttgtatagttttgtataatataaagtagatatttttatgaggtgaaaaaatgaatatttcatttatggctgcagcagccggttttggtagttattcaacaatcattatgatgattgttttagttggttttacatactttttcatgattaagccacaaaagaagcgtcaacaacaagcaatggacatgctttctaagcttaagaagggcgacaaggttatcttagtaagtggtttacatgctaagattgattcagttaatgacaaggacaagacagttgttgttgatgctgatggaattttcttaacttttagtaagatggcagttcgtcaagttgttgaatctgcacctaagcaagaagtaaatcctgcagaaactgaagaaaaggctgcttcagaagaagaacaagctaacgaagacaagtaagatagacgccgtgaggcgttttttctatgtctaaaactagaatgttgtaaaattatttatgaatgtgagtaagacttagaagggatgactatgaaaaatataccagtaattatgactatttttggtggtagtggtgatttggcccatcgaaaattgtatccagctttatttaacttatatgaacaagacttaattaaagataactttgcagtaattgggacggcgcgtaggccatggagtcatgattatttacgtgagcaagttatggatgctgttcatgaaaataataaagaagttgatgaaaatcacttaaagcagtttgcaagtcatttttattaccaatcacatgatgtaacaaatactgaacattaccaagcaattaaagatttagctaatgacttagatagtcgttatagcgctcaaggtaatcgcatcttttatatggcaatggctcctcgcttttttggaacaattgcaactcatattaatgaccaaaagttaattggcagtggcttcaaccgaattgtggttgaaaaaccttttggccgcgatcttgcttcagctagtgaattaaatgaagaaattaaggcctcattcaatgaaaattctgtatatcgaattgaccattatcttggtaaagaaatgattcaaaatattttaccaatgcgcttatccaacccattaattaagaatatttggtcaggtgaatatatcaaaaatattcaagttactttggctgaaaatctaggtgttgaagcacgtggtggatactatgaaacttctggtgccttgcgcgatatggtccaaaatcatatcttccaaataattactttattagcaatgggtgaaccaactgcacttacttcagaagctattcatgctaagaagcaagaattacttgatagcatggttattccttcagctgatgaaataaagacagcctttgttagagcgcaatatgccggaacagatgatacttttggctatttacaagaaccaaatgttgctcctgattctaaaacagaaacttttgcagccgggaaagtgaagtttactaaaggatcattagctaatgttccaatttactttagaactggtaaaaagctgcgagaaaagaagaaccggattgatattgtcttaaagcatatgaacaacttgtatggacaagctcattctaataacattactatcattattgatcctaagagtgaaatttatttcacaatcaatggtaaacggatttctgagcctggaattcgtcgtgaaaatttagcttatgaattttcagattatgaaaattcactagttccagatggttatgaacgtttacttcatgatgtttttgtgggagatcaaactaacttcactcactggagtgaacttgctaagttctgggaatttattgatgcagttgaagatgcttggcaaggtgaaaacaaaactatcgataaattaattcaatatccacaagggaaattgggaccaaaacaagctagtgaaatttttgaaaccccaactgaacgatggatttatgaataatggatttacttcctaaaaatgatattcatcgcaaaattatccatttagatatggatgctttttatgcttcagttgaaatgagagataatcctgagcttaaaaataaggcgttagtaattgctcatgatcctcgtgaatataatggtcatggggtaattgcgactgcaaattatcttgctcggcaatatggtataaattctgcaatgccagcaattgaagccgttagaaaaatacccaaagataagttagtttttgtaacaccgaactttgataaatatcggcatgtttcagctcaagttcatgaaattatgcatgctgtaactgatcaagtggaaagtgtagctttagatgaagcatacatggatgtaactaataataaactaggtaactttagtgcaattgaattaggctgttatatgcaagagagaatatacaaagagttgcatcttggtgctagttttggtgttagttacaataaatttttagccaaaatgggttctgagtatgccaagccctttggtagaagtgtaattctgccgcaagaagccgtggcttttcttgcagaccaaccgattaagaaattccctggggtcgggaaaaagacgcaaggaacttttaaagaattagggctacagactggtagagatttacaacaattatcagtaaaaaagttaacaagcttatttggaaaatttggctatcaattagcacttcatgcacatggaattgatttttcaccagttaaggcgcagcgcaagcgaaaatcaattggccgtgaaaatacttatttaccagttttatttgaccaaaatgaaattttacgtaacttaagaaattttgctgaagtcattagtaagcagctaaaagaaaaaaagttgcaaggtaaagtagtaacaattaaggtaagaactccagattttgttaccaaaactaagcgacaaactttacctaaattcacaagtgatgaacaagtgatttatcaagctagctatgaattacttaggcaggtcgattatcagactgccggcattcgcttattgggaattagtgttagccagcttgaaagtattcgatatgcagaaataaatcttggtttattttcaactgattggtaaaatatattttttatctgatagaatttatattgaatttattaataagggagcacattattatgtctaatactacttttgatgaaatctatgccaaaattaaagaatatgacacaatcattttacatcgtcatattagtccagatcctgatgcaattggttcacaagctgggcttggacgttcgattaaattggcattcccagaaaagcgagttttatatgctggtgttgactggggcgatttaacttggattaataagggcgacgatatcaaggatgaagactacaagggagcattggttattacaactgatacagctgatcgaccacgggtttcagaccaacgctacgatatgggggactttttaattaagattgatcaccaccctaatgttgatccttatggtgatttatattatgtaaatgatcaagctcctgcagcaagtgaaattattgctgatttcttgattagccaaaagatgccaattactgctgaagttgctttgccaatctatgccggaattgttggcgatactggacgtttcatgtatccagaaacaactgctcacacctttgaaattgcagcaatgcttgcaaagactggtattgatttgactcaaatcgctagaaacatcagtgatgtaactttcaagcaagccaaacttcaaagtagcgtattagactacatgacagttgataagtcaggagcagcttatgcagtactaacccaagctgacttgaagaagatgggagttacaactgaagaagcttctgtaactgtttcaactcctggtagaattaaagatattttgacttggagtgtaattgttgaattagaagatggtacttatcgagtacattatcgttcaaagggcccagttattaatggtttagctgctaagcataatggtggtggccatgctttagcaagtggtgctaaggccaaagatgaagcagaaattaaacaaatttttgcggaattaattgatgttacaaacaagtataaggaagaacatgaataatatttttttagattcacgaattaacgcaaatcttcaagcaggtcttgaaaaaataaactttaaaaagccaactaaggttcaagcagaagttattcctgtctttttgactggtaagaatatgctagttcaagctgcaaccggttctggtaagactcatgcttacttaattcccgctcttaatgaagtagctccaagcagtcaaactacccaaatagttattactgctcccagtcgtgagttagcccaacagctttataatgttgcgcggcaattgagagatgcaagtaatttagatctttcaatttctcttttagctggtggtagtgatcgtgaacgccaaatttctaaggcagaaagtaaggcaccacaagttatagttgctactcctggtaggttacttgattttgctaaaaagcggattatcaacttagaaaatactaagtgctttattattgacgaagcagatatgtcacttgatttgggatttttaggtgatattgatcaagttgcagcacgtatgcctaaaactgtacaaattgctgcattttctgcaacaattccagttaagcttgataactttttgcgtaaatatatgcaaaaacccgaaagaattattgttgaaaatccggctgttattgctcctacaattaaaaatgacttgcttgatattggttctaaagacagaaagaatattttgtacaagttgttaacaatggggcaaccatacctagccttagtttttgccaatactaagactaaagttgatgaaattaccagctacttgcaagatcaagggttgagagtagctaagattcatggcgggattactgaacgtgaaagaaagagaaccttacgtttagtgcgccaaggcgactttcaatatgttgttgcaactgacttagctgctcgtggaattgatattgatggtgtcagcttagtaattaactatgaattacctaaagacttagagtttgtaattcatagaattggacgaacaggtcggaatggattaaaggggcatgctattactttaatccgtgaagaagaaatgaatttagttggccaattagaacacgttggtgttcaatttaactttgttgaattgaagaacgacgaattagtagaaagaactcactatcgccgtcgtattcaaagaagtgcaactaatcataagttagataatcgtctaattggatatgttaaaaaggctaaggttaagaaaaagccaggttataaaaagaaaattaaaaaagcaattgctgaagatgctaagcaaaagcgaaagcttgaaaaacgtcatgaggcaagagttgaaaaacgtcgtcgcaagcgcaaacgcgttgacaaataatggctaagtagtaaaattattttcagcttaagatatgttttttactgaacttattttcagagagggatgctttggtgggaaatcctaataagaagtaaaaaatgctcctttaagttcttaaatttcgatattaaagtggtaacaaacactgttgcaatcaaggtggtaccgcgcgttggcgtccttgaatatgtgcaatagtgtttttttatttaaggagataacgatgaagaagcttacaagttcagagtttcggcaaatgtaccttgatttctttaaagaacatggtcacatggttttgccatcacaatcattaatcccacaagatgatccaactttactttggattaactctggggttgcaactatgaagaagtatttcgatggttcagttgttcctaagaaccgtagaattactagttcacaaaagtcaatcagaactaacgatattgaaaacgttggtaagactgctcgtcaccaaactttctttgaaatgctaggtaacttcagtgttggtgactactttagagatgaagctattccttgggcttgggaattcttaactagtcctaagtggcttggtttagacaaggataagctttactgtactgtttaccctaaagacgttgattctcaaagagtttgggaaaaggcagggatgccaaaagaccacattatcaagttagaagacaacttctgggatattggtgaaggtccatgtggtcctgatactgaaattttctacgaccgtggtcaagaaaataacgacgtagctgaagatgacccagaaaacttcccaggtggtgaaaacgcacgttaccttgaaatttggaacattgtgttttcacaatacaaccacttaccaaatggtgaatatgttgatcaaccacacaagaacatcgatactgggatgggtcttgaacgggtactttcaatcttgcaagatgccccaactaactttgaaactgacttattcatgccaatgattcatgaaactgaaaagatgagtgctggcaagaaatacgcaactaacaaggaagatgacgttgcctttaagattattgctgaccacgtacgtgcagtttcatttgcaattggcgatggtgcacttccatcaaactcaggccgtggctatgttttacgtcgtttaattagacgtgctgacttaaacggtaagcgtttaggtattaacggagcctttctttacaaattagtaccagttgttggtaaagttatggaaagtcactacccagaagtcttgaagcaagctccattcattcaaaaagtaattaagaatgaagaagaccgcttcggtgctactcttgaatcaggtttaactttacttgatgacttaatcgaaaaagcaagtgcaaatgacgacaagactatttctggtaaggatgccttcaagttatttgatacttacggtttcccatatgaattaacttttgaagctgctcaagacaagggcttaaaagttgataaagctggctttgataaggaaatggaagctcaaaaagaacgtgctagaaaagctcgtggtgacttacaatcaatggggcgtcaagatgaaaccctgatgaacattaaggacaagtcagaatttgaatacggcgtttacgaagaaaagcatgctaagttaattgacatcgtggttaacgacaagttagttgataaggctgatggcgaatctgcaactttgatttttgataagactccattttatgcagaacgtggtggtcaagtagctgaccatggtgatatttatgaccaagatggtgacttagttgctaaggttatcgatgtgcaacatgctccaaatgaccaaaacttgcactttgttgaccttgttttgccaatggaaaagggtaaggaatatgtcttaaagattgatgctcaccgccgtgaaggcttgcgtcactcacatactgcaactcacttgattcacgcagcattacgtgaagttttaggtgaacatactcaccaagctggttctttagttgatcctgacttcttacgtttcgacttcactgctattgacccaatgacaccacgtgaaattgaaactgttgaacgtttagttaaccaaaaaatttgggaaaatattgaagttaagactactattactgaccctgaaactggtaagaagatgggtgcattagctctctttaacggtaaatatggtgataaggttcgcgttgttcaagttaatgacttctcaatcgagttctgtggtggtactcactgtgcaaatactgcccaaattggtatcttcaagattatttctgaacaagcaattggtgccggtattcgccgaatcgaagctgtaactagcgaaaaggcctacgaatatcttgcaaatcgtgatgctttacttgaagaaatcaagaaagaagttaaggctactaaagctgaagatattaagactaagattacttcacttgaagaagaattacatgctagtcaaaagaaggctagcgaacttgaatcagaaattaatgcagcaaaagcaagtgatatttttgaaaatgttcaagaagttaatggtttaaaggttatcgcagcaattgccaatgtaaatggtatgaacgatttacgtgaacttgctgataactggaaatcttctaacaagagtgatgttttagttcttgcttgtgcaaatgatggtaaagctaatatggttattagtttaactgacgctgctttagataaagggcttaaggcaggcaatttaattaaggttgcagctcctatctttggtggtggcggtggtggccgtccaaacatggcacaagctggtggtaagaaccctgcaggccttaaagatgcaattgcagccgtaattaacgagattaacaagtaaaattaattgttttaaccgcgtttttcaagtagaattgccataggaggaatgaaaaatgagttcgctagataaaactatgcattttgatttcaatcaaaataaaggcaaaaatgtttatgatactttacaagatgtttatagtgctcttgaagaaaaaggttataatccaactaaccagattgtaggatacttactttctggcgacccagcttatattcctcggcataatgatgcacgtaatttgattttgaaacatgaacgtgatgaaattatcgaggaattagtcaagagttacttaggcaaggataagtaatgcgtttattaggccttgatgttggttcaaagaccgttggtgtagcaattagtgatgagctagggcttactgcacaaaaactagaaacaatttcaattgatgaaactcgacacaattttggtatgaaagcaataaaaaaattagtgcgagaatatgatgtaactggttttgtactaggtctacccaaaaatatggatggttctgatggggtaagcgtgagtcgaagtaagaattatggtaagagtctagaagacaagttttcattaccagttgcttattctgatgaacgtttgacaacaattgaagcagatcgcgttttgattgaagaagctgaaatccatgaccgcaagaaaagaaaagaagtcattgatcaaatggcggcggttttaattttacagaattatttagatttaaagagaaggaacactgatggcagcaacaattaatccaggcgatgacaaagatcgccaaattaccttagttgatgaccaaggtaatgaagaattatttgaaattttattcacctttcattcagacgattatgacaagagttatgtgttactatatccagctgcaattgctgaagatgaagatattgaagttcaagcttttagctatgatgcaaatgcagatggtgatgtaacaagtagcaacttacatgaaattgaatctgatgaagaatgggccatggttcaaggagtcttgaacacattcttagatgatgatcgtttaagcggtgaataattaaagggactggtttaggccggtccttttttataggtaaaagggaatatgaatcataagattttaaagatactagaatatccaagaattactgaaaaattagctcaagaagcagttactgatacagccaaaaagcaagcacaagatttacaacctagtgataactctgcccaagtcaggctaatgctgtcccaaacacgtgctgtagcgaatttattacgaattagagggcaattacctattgtaaattttaagcccttagaaggcagcttaaagcgcttaaaagtaaaggcaagtttgaatgcagaagaattagcgaatatcttacttattttgactttggcgaaagaaattaatgactttattgaaaaaaatgaagatgctgaacttgatttaagtgcaattgataaaatcttacaagacttgcaattacctgctgaattattgtctgaattaaagcattcaattgattttgatggtagtgtattagattctgcttctactgaattagctagattgcgacatgatttagctgctaatgaagaagaaatcaaaaataaaatgactgctttgacaaaatcggcaagtaagtacttatcagaaggtttagttactattcgtgatgatcgatatgtattgccggttaagcaagaatttaagggtaagcttggcggggttgttcatgatcaaagtgctagtggtcaaaccttgtttgtagagcctgaagcagttttgaatttaaataatcgtcaacaaagcttgctggcacaagagcgaaaagaaattcgtaagattttgaagcacttatcagctttggcaggtgaagatactgaatgtttgagaaagattagtgatgcattgacagagcttgatttcttacaggcaaaagctaaattagctaagaaaatgaaggctactcagcctcaaatttctgataatcatgaagttcttttacgccaagctcgtcaccccttaattgatccagaaaaagtagtaccaaatgatattagtttggggattgattttgatacgatgctaatcactgggcctaacactggtggtaaaacaataacattaaagactttgggattgattcagttaatggcccagtctgggttatttattccaacaagcgaaaatagccaagtgggtgtctttgatgaaatttatgcagatattggtgatgagcaatctattgaacagtctttgagtactttttcttcacacatgaatgatattatctatatcatgaagcatgtaaataaaaatactttagtcttaattgacgaaattggggcaggtactgatcctgaagaaggggcaagcctggcgattgcaattttggatgaattgcgagaacatggtgcaaaaattatggttactacccactatcctgagctgaagctctacgggtataatcgtgatcgaacaactaatgcttcaatggaatttgatgtgaagaatttgactccaacctacattttacaagtgggtattccaggttattcaaatgcgtttgcaattactagaagattagggatgaacgaaaaagttgttaaaaaagctgaaagcttaactaaagactctgattcagaactaaataaaatgattgcccgattaaatgaacaaaccaaagaagtaacggctaagcgtaaattcctagctaaaaatttagaaaaatctgaagaacttttaaagaagttacaagatggcttagatatttacaatcagcgggtacaaagacaattagaatttgccaatgaacgggccaatgaagtggtcgccaaaaaacgtaaaaaagccgaagcaattattgcggaattagaaaaacaaaaagccagtggcgcagcaattaaagaaaacaagttaattgatgctaagggtgattttaataaattgtctaaggaagcagataatttagctcataataaggttttaagaagagaaaaaaagcggcataatgttgcagttggtgaccaagttaaggttctgtcatatggacaagttggtacagttactaagaagctatctgatcatgattatgaagttcaaatgggaattgtgaaacttaaagttacagatcgcgacattgaaaaagaagcaaataaagctcttaagaaaaagcaaaccattgttagaactactcgaaaacttaatcgagcaagtgcaagtagtcagttagatttacgaggtcagcgttatgaagaagctatggttaatttagatcgatatatggatgcttctttgttagctggattgagtagtgtggtaattgttcatggtattggaactggcgcgattagacaaggggtttggcaatatttaaaatctagtcggcatgtcaaaagttttaactatgcacctgctaatgaaggtggtaacggagcaacgatagttgaattaaaatagtgagcaagttacttgcaaaaagtaagtgctaatcatagaattaaagtacaaataaaaaattagttttatagagtagaggtaattaaaatggtcgaagctttaacagatcaaaattttgctgaagaaactaaggaaggcgtagttttaactgacttttgggcaacttggtgtggtccatgccggatgcaatcaccaattattgatcaattggcagaagaacgccaagatgtaaaatttactaagatggatgttgatgaaaatcaatcaacagctaagaatctaggaattatggcaatccctactttaatcattaaaaaagatggagaagttgtggatcgaattactggttatacaccaaaagagaaattagatgaaattttagatcaatacactgattaatagataaactaaaagaggttacttcgtttgaagtagcctcttttaatgcaattaatattgagcaatgatttgaactttgttttctttatcattgataacaacgctactttcacaatcgcgttgatttgcacttgctaaacaagcgctgataataccagcctcaagttcaaaatctttattgtcactatttaagcgatcttctacaacttgaccacttaattcaaaagtggctccaactctcttttcagtaattaactttaaatccccaaattgagccatttgaaagaagtcaattaaagattctgtatcacttaaagcatatttattagcaatttttttaccagcccaatataaaatttctttagtatcttcccctaaaatagttggtaataaaaaatcgcgataaagttgattaataaaatatgagtgttcgttattttcttgcatagctttccatccctttgtattcttttctattttacattaaactaggggaagcgaaaaatattttttacaagtctgaggagaaaaaatcatggataatcgaccaattggattattagattccggattaggtggcttaaccgtcctcaaaaaggttatgaaaaaactaccaaatgaagcaacggtttttattggtgaccaggcccacatgccatatggtgataaaacaaccgaagaagtaatcgaattaacaagaagaagtgtcaattttttactgtcaaaaaatgtaaaagtaattatttttgcatgtaatacggcaacagctgcagcaatggaagtaattcaaaaagaaattactcctcaaattattggagttattcaatcaggtagcttagctgcagctagaaccactaaaaataataaagttgcagtaattggtacgcatgttacgattgaatctcatgcttatagtagagaaattaaattccgtaatcctgatattgaagttacagaacttgcaacccctcaattagcaccacttgtagaagcacaacgtgattacgcttacaatattgatgtggtaagggatagtttagactccctaaaggaaaaagaatttgatacaatggtcttaggttgtacacattatccaattattgagaaagaaatttctaaagttgttggaagtacaattaagctagtagatccagcagatcaagttgcgcaatatactgaaaatgttttaaagcgtgatgggatgctagcaggaaaaaaaggaaaacgtgaatactatacaaccggtgattgccaaaagtttactgaaattgctcgtaaatggttagatgatccggagttagtagctactcatgtagaaacgggagaagatttatgagtaaagtattattatttgcaactaataacaaaaataaagttaaagaactaaaagcagctttccgaaaggccggcttagatattgaagttaaaactaatgcggacttagaagcagctccacatgttaatgaaaatggtagtacatttgaagaaaatgctactttaaaggcccatgctttagcagaattctcaaagatgccaactttaagtgatgattctggtttagttgttgataagttaaatggtgctcctggtgtacattcagcaagatatggtggtgaagcacataatgacgcaagaaataatgctaagttacttgcatcattaggtggtattccagaagaagaaagatcagctaagttctgctcaacttttgttttatcaatgccaggtcattttgataaagacttagttgtaacaggagaatgtgaaggggtagttttggcgattcctcgtggacatgatggctttggttatgatccattattctatgttccagaaaaaggaaaaacttttgcagaaatgacaactgatgaaaagaatgaaatttctcaccgtggtaaagcacttaaacaattagtagaaaagatgccagcttggcttgaacaattttaagaggtaagttatgccatttgtacatattgaattaattaagggcagaagtcccgaacaattagaaaatttaatgaaagacgttactgacgctgttcataaaaatacaggtgctcctaaagagcatatccatgtaattattaatgaattaggtccacatacttatgggcaaggtggacaatggcgtgcataaaaaaggtcctggaagaatccaggacctttttattttaagtgagcaaattcaatgccagcatcttgaaaagctttaatatagccacttaaataattattttttatttcagttgaatttccgccaattacttgtaagtgcacttgaattgtaacgtttggcccctcttgcttggttacaccataattggtaggtggggttgataaaaacttttcatttcgtttgagctgcttattaacttgattaattagcgtatttactttggttaaatcatttttggctaataagtttaattcaatatctattccagtaccaccatgagataaattagttacttccaagatttttcggttggggatataggtaagggaaccgtctatttgtttaatgcaagttgttctaatacctaagcggacgaccgttcctgtttctgttccaatttttactaaatctcctacattatactgatcttcacttaaaatgaagaagccatttacaaggtcgctaacaaaaccctgagcgcccatacctaaggcaagggagaaaatacctgcactggctattaaggtgccgacagggacgcctagaatgcttaaaacgccaaataaatagaaaaataatgtagtatattggaaaacattggttgataagttggcaattgtctgactacgcttgtttaacttaactttgccttttaaaaagtatttggtaattacacgtttaccaaaattattaattaaaagaaaaattgcagtagtaatacttaactgccaaattacacttataaagctatttaaatactttgaccagtcgattgaccaatttgaaaacatttttgaagctaacgtgtacatttatttcctcatttcgtgctattatgttaatagcataccagataatgatgtaaattgtcagatagactaaatcatgctagactttttttagatgaattaatttggaggaaaaataatgttaatttcttatggtgcattagctggcttaattgcagcggttgcttttttgttgtttgtattatttactattcctgttcttttaagaactactaagactttgaaaaaagttgaacaaacaatggacatcactaatgatgctttggggaagatgagtaatgatattgacgacattatgaagcaaaccaatgacttacttgataaaactaataatttattagaagatgtaaactccaagatgaaaactgttgaacctgttgttcaagcagcagcagatttgggtgaaagtgtatctgaccttaattcatcatcacgtaaattggcaactcgtttttctgaggtgaatattaagaagacggggttgatgaccactattttgacaagtattttggctagacgcagaagacgtcgcggtttagattagaaaagattggagagtttctctatgaaaaaattaggagcatttgtatttggaacagttgttggtgcagcagccggtttagcagcagctgcttatcttcttccagatgaaacaattgaagaattaaagcaaaagcttgataataatgaaactttgaatgacttaaaaaagaagtatgataattcaactgaagttgtaaaaaatcaacttgctgcctttccgaaaaatgttgaagatgattcagaacttaaggattttgatgatattgtaattgattcaactaagcataatctgggtagcaatgaaaatgatgataacgaaactttaagtgatttagaaaacgctgaaaagtaaaaaagctttaccgaaaggtaaagcttttttatttactattttttgtcacgtaatgggatgtatttaagcgatttgtcagttttggtaaatggttcaaaaccgttcttagttacaacaccgcagtcttcaattcgaacaccaccaacgcctggaatatagatgcctggttcaattgaaaaacacatgccttcttcaattactaaatcattgccttgcataattgatggaaattcgtgaacattcttaccaattccgtgaccaagacggtggataaagtattcgccatagccagccttagtaataatgtcacgtgcaactgcatctagttcagcagctgtaatacctggcttagctgcttcaattgcagcttgttgagcttcacggtcaatttcatagatttctttttgcttatcagttggagttccataagctactgttcttgaagaatcagatgcatagcctttatgcatggtacctaagtcaaagaggaccaattcattaggcttaatcgtattcattgtaggaccaaggtgggggttagatgcgttttcaccagcttgaacaatagtttcaaaactttggtgcattacacctttttgtaacttaagttgataatcaatctgaccagcaatgtatctttctgttacaccagttgcgatattatcaaaaccgatttgaaaagcaaagtcagcttcagctcctgcagcttttaacttttcaacttcttcaggagttttgtaaagtcttaaatgatcgatgaattcagataaattagtatcaaaatcactgttattaaagacttgacgcaaaaagttatagcgttcaactggcaaattattttgttcaattgcccaatgcttgaatgacttggttctcttttctacatgatttttaatgatttgccatggattttcgtggtctaaataaccgtatacatcaccattccattcagaatgcttggcttcttcgacgtttagagcaggacagaagatgaaaggttcagcatctttaaatgccaataaggcaaagattctttcctcaggttccatttcataaccggtaaaataagcgattgtaattgggtttgagatataagctgcatcaacattatgttcagctaaccaattttgtaatttatctaaattcatgctcttttctcctttataattaaaaatcttttaaaactattatataacaatataaagaatttaccatgaagtgggcaagcgtttgcaccactagagtaattcgtggtattgttatataatgagttagtgaaagatgaggagcgaaattatgcataagcaagaagtaactatttatgatgttgctcgcgaagctaaagtttcgatggctacagtttcgcgagtagtgaacggcaataataacgttcgtaaggaaacccgtgatcgggtaatggaagtaattaatcgcctccattatcaacctaatgcagtagctcaaggtttagcttctaaaagaactactacagttggtattatcgtaccagatttaactaatttgtattttgcagagttgtcaaagggtattgatgatattgcaactttatataagtacaacattatcctttcaagtactgaaaataagttgttaaaggaagatcaagttattcagggattgcttaataagcaagtcgatggtgttatttatatgggggaccgtctttcagatgaagcagcagcggcctttgaaagaacaaatacgcctgttgttttagctggaacaattgattcaagagaacaatttgcatcagttaatattgattatcaaaaatctgataaagaagctttaaccttgttattagataatggctgcaaagaaatagctttgattttagcagatggtgaagcatctattaacaaagaaaatagaattagagcctaccaagaatttgctgaggaaaataatttaactaagcatatttatcaagatatttattcttaccaagatggttacgacttatatgataagcttgaaaaagatggaattgatgctgctttagtaactagaaacttgtcagcagtggggattatgaatgctgcgttagatgatggtaagaagattccagatgatttggaattgattacatcaaatgccactgcaatttctgaagtcgttcgtccaagtttaactaatattaagcaacctttatatgacattggtgccatagcaatgagaatgctaactaaattaatggcgaatgaagaattagatgaacaacatatggtaatgccttacgaattggtagaaaaaggtagtactagcagaaaataaataaaaaagctgggaggttatcctcccagcttttttgttcaaattattcagcatctttagttaattcgtaaattgcttcagcgtaaatgctaattgaattaattaaatcgtcaactttcatatattcatttgcttggtgcataaccattggtgcatcttctggttgagcaccaaaggcaaccccatgttcaaataaacgaccataagtaccgccaccgataacaacttcgtgacctggaagaccggtttgcttttcaaaaacattaagcaaagtcttaacaagcggatcatcacctggtacatagtgaggttcttcaaagccattaaatgaagcttctaagatgtcaccatatttttcagtaacttgcttaaccatcttctctggatcggttccttgtgggtaacgaatgttatcacgaagttcagctttttcgcccttcttaaagtcaaacatacttggagcacttgataaatcacccattaagtcgtcatggtgagcaatgcctaatttttcacccttgaagtcttcgtgttcaacgctacttaagaagtgaatgtagttcttagcagtaccagctaagtcaagattatctaagaagactgctaggaaagtagctgcgttacgtccaacttgaggagcagaagcgtgagcaccttgaccaactaattctaagttagcagtatcaccttcaatttcgaatttgccttctaagttgttatcagctaagaatttttcaaaactagtcttaatgtcagctaagttatcagccttgatacttgcaaaagccttttgtggagttacgttttctgcaattcctgccttgaaagtaagaaggtcaatactgccagtaccagctacttctttaaagttcataattaaagtgtagataccttgttcaccattgataattggaaattcggcatctggtgagaagacttggtctggagttggttcatgctttaagtagtagtcaattcctacccagttagtttcttcattagtacctaaaacaaagtcaatcttcttctttggcttgaagccagcttccttcaaaataagcatgccgtagtatgcagctaaagctggccccttgtcatcagcactaccacggccaataatcttaccatcttgaattagcatcttaaatggatcagttacccagccgtccccagcaggaaccacgtccatgtggccaataacacctaagcgtttttggccttcaccataattaacacgtccagcgtaattattaaagttttgaacatcaaaaccatctctttcagcaaaggaaagaaacttcttcatggccttaactggaccaggacctacaggatattcttcactagcgttatttaagtcttcagaagaatcaatcgcaattaattcgcctaagtcttttaaaatatcgtcttttttagcaagggctaattttttataatctaattccatcgaaaaagcctccttaatcatattaaattaattttatcataaaaaaagcgcttcttttatgaaagcgccttgtgattaagaaaagattttaaatttggattaaattgctgagtatatgggtcacgtaaaatagtaaatgagagtagttcaatattactgtatcttgtatttgcatcaagtagttggtagcggctaaaagcaaaactattaatcggaaaattagtgaataaaatttctcgtgcttgaacccaacctaagttagtcttaatccaaagatttttactagtaccagagaagccataaattttatagttttgattaaatcttaaatgcttatgtaaatacgttaaatgatttggcgataaatatacttttactttggtatgcgatggagttttgatttgagaattgaaatatggattcaagttatcatagtttaagtcaaaacttatatagtcagctttgacaaatgaattgccgcctagttgataataaagttgattccctacttgaacactttttagaacatgaacattttctaaaaatgatattttggctttatttgtaactggttgatagggattcataatagtcttggcttgattaaagcctaagtacgtagcatctttattaatttctacttgctttgagccttctttggctactttatatttgaaaccagtagctgggaagttagtcactactccatcgatattattattaattaaccaattccaaagtttaggtgactcatccatttctgcccaaacgaaaatctttttatcactaccatgaagccattttactaactcaggatattttttgattaaatcacttgaaacattaactgcattgacatattgcagggtatcataattaattctttttaaggatccaacaataaaaattcgctcaacatttggaagtaattggctaaaatagtataaactcttggctgaaaaggagtgaatcattacccgattttccatatgatattttttaatactagatgcaataactttttctaagttgttacttttattaactccatggtcaactttagtttcaagaataaacttagtatttggcttatctttatagtattcaaatagttgatttagactaattacatgttcgccattagagtattgaagcttacttaaagtttcaaaggtattttgtgatacaatggcatttgtaccaaccattcttcctaagtcgtcatcatgagaaacaaccgctatattatctttagataagtgcaagtctaactcaacataatcggctccggaatcaaaagcagaattgtcactttgaatggtttcttctgggtatttagttggatctccacgatgtccaacaactaaaaaaccacaattgattataaatattaaagataagaaaaggccccaatttaggcattttttcaatttcatctgtccacctctgttgtttttacgatagcatggaaagagttttttttctattaaattagtgatttttaaggagtgcataatgaatcaaaattaccaaacatttgatatgattgaagaaataacccgtaatgacggttcaacttactatgaaattactaatgttgaacaaaatggaatcgctgaattagcttgtgaccggggaatgattaaagaagttcgcttactgcagcttaatattgccagaactaatgctttaaaaacttatgaagcatatattaataaaacatataaatttccaactttaaccaccttgactaagtgggaagaatgggataagcctaaaggaaaagtattggatgcttataaattaattttaaaatcaaatcatattggataagaggcaattatggaaaaaatcagaattttgcataccaacgacttacattcacattttgaaaaattccctaaaattaaacgcttcttaaatgcagcccaacaagatggtacggttgatcaagtctatacttttgatgcaggcgactttatggaccgttctaatccattaagtgatgcaactaatgggcacgctaatattgaattaatgaatcagtttaattatgatgctgtaacaattggaaataatgaaggaatttctaatcctcatgaagttgttgaacatttatttgatcatgcagaatttccaactgttttagctaatttgcgtgaagaagatgaaagtatgcccagttggtgtactagttataaaattttcaccacaaaaaaaggtacaaggatagctgtcattggattaacagctccttatccaatgacatatggacctaatcactggcatgtaaaaatgttaggagaagtgcttcctaatttattagctaccttaaaaggaaaatatgatatattggttggcttaactcatattggagttaatttagatagttggatagctgaaaaatttccagaatttgatttaattgttggaggacatactcacactttattagaacatggaaaatgggttaataagaccttgattgttcaaactggaaaatggggacgttatgttggggatgttaatttaaccgttgatgagcagcataaaattaccgaaataaaggcttgtgttcatgaaactgctcaaatggccgagcatgctcaagatatagctgaaagcaaagccttgtttgaaaagggaaaacaattactagaaaaagaaaaaattgctgatttgccggctttatttgaaaatgataaagaagaggctttagcggtttcgctagatgcgatagctgattttgctgggacagatttagccatgctttcgacgggtctttttttgacaccatttaaagaaggtattttgacgcgctttgacttacaaacttgtttgccacatccaatgcatgttgtacgtactactttaaaaggtagtgatttatggcgattggttatggaaattgaaaagaatcggcattttttaaaaaagttccatttaataggcatgagcttcagaggaaaagtatttggagaagtttactatcgaaatattcaagtagatatgaaaacgcgaattgtttatgtgaatggggaagaaatcgatcctgaaaagtattatcaaattgcgaccttagatcattacattttgattccattctttccaactttggccgttgttggtgaaaatgaatttctgttccctaaagtattaagtcaggtaatcggtgaatatttagcaagaaaatatccaattaagaaaggtgaggttagtggaagaaaataagcaagaaaatactcctaccttgcatcatcctttagcatcagtagcgcggttaggtgataaattaataattaatgggcgtcaatacagcatcattgctaatgaaaaagatgctgttgatttggaactattaagacaaaaatatgatccttatcttgatcagtatgattttttagttggtgatatttcaagtgagcatttacgattaaaaggtttctttcaagattgggtgagaacctcaattgataagaaggtttcaacaatagttgattacttaactgaatattgtaatcctggaagtggctattttattttgcaattggatgaagataatacatataatgaagtaagtcaaaactttaagcagaaaaagacttataatgtgcgttttagaagcaaaaataattaccataaaaaaaagaataactcacattattttcgggaaagaaaagttaagaaaacaaaatttaattctaaaaaagattatgcccaaaccaaaaaaggtaagcatcatgtctttgtaataaaaaaacgtaaggatagataattactaatgaaacaataccaactcttcctaatagatttagatggtactatttatcgagggaaagacacaattgaatcaggtgttaattttgttaaaaggttgcaggaaaagcagttagattatatttttttaactaataatacaactcgaacacctcaaatggtggttgataaattagcaggacacggtgtaaaaactgatattcaacatatttatacgccttgtatggctacgagctcatatattttatctgaaaaaaagactgccaaggtttatataattggtcaaattggtttgtggaatgagttattgtctcatccagaaattagttttgatgatcaaaatcctgattatgttgtagttgggatggatactgacttaacatatcataagattcggactgcagttcgccatattagaaatggggcaaaatttattggaactaacagcgatttaaatttgccaagtggggatgagttgttaccaggtaatggttcagtatgtaaaatgatagaagtagctagtggacaaaaaccattgtttattggtaaaccgtctaacattattgtggataaattactagaaagaagtccttattctaaacaggattgtttaattgttggagataattatttaacggatattcatgctggctttaatagtggagtagatagtttgttaactttaacaggcgttaacaaacgtgaagatattagtggtaaacgtcaaccaagttatgttgtggataatctggatgaatttgaattatgaaaagaagaaaattaatcacaaagggtacatataatcctatctttcactttttaatgggaatcgcgagtgcagtaacagggacaattttattaagctggccattacttgccttatttgtacaagttcaaaaaacttacgaaacagttaacttaacacttggacaagtaatgcataattatagtcagttactttggtttttgctttggccatttaagcatgaactaaaaatggataattttgctagctccagtaatgcaattgagcactttactgaatgcaaatatttatttgaactagctgtaattgtatttatattgggattaatagttttacgatttaaacctaattttgatcatttatctaaaacttgggcattaatttttatgcttattccggtagtagttgtcccatttgctgtagcgaattttgatacatttttcgttacttttcatcatatgatttttcataataataattggctctttaatcctttgactgacccaattatcaatgtcttaacagaaggcttctttgcggcatgtttttcaatatttggaataatttatgaactgtacttcgcaagatttttattgaataaataaaagctatctagttgcatcacttaatgcaattagatagcttttttgtttagtttttaacccgataactttcttgaagcaaaccattaaagaagtgctgcaatgatatttgaacgggcatagcactttcaccgtttagtttgcgcatttcattgtggatattacgatattcgaataaattattggcataatctaataaaatatcattttccggatagtctaaacacatattggccaaattactgattcctactttgagggagcgacgaattctttgaaaaataattcttttatcatgctcagtaatatgtaaatcacgttcaaaattgatctgtgagaattcgatattttgatcacacataatattgcaaatcttcataatatcttcaaccccagcttcagctgcaatacctaaaaatctgagtacttgggatatgtactctgtttgttcacgatggagggcttgtggccgagtatatggtgcaatactggaactagatatttcataaatttgatttagacggtttaaaagcattgcgtaagaagcaattaaacgaatcatttgtctagcttcaactaagttgagaggtgaagtaataattaaatcaacacttgaatcataaatagtttgcattttttgtggagataattgagggcaaatcatcaaaaatctaggacgagagccaactttcttgagcttattaataagctcaagaccagcttcattttcatcaagattgtaattaataattaagatatctatatgtaattgaataatttcactataagcgcgattactttccccagcagttccgacaacaattgagtcataatctgcttcaattaagtttcggagattatcacgattttctttgtttggatcaacaatataaaaattcatatcttattacctcatgaataaaattgaaatttgatgatgtactttgaaacggcattttaaaaaatataagagctaaatagacattgaacttagctctggatgtctttgaaagcgctattaatatttatctattaatagaataacacaaaaagattgaaaaaaagaagtgaataatgggagtactctatgaaacactgtgaaagcggttactataattaaaactgaaaataaatggaagaaatattatccaggggaggatatatcaatggcttttaatttaagaaatcgtagttttttaacattagcagattttaatactcgtgaaatggaatacttacttaacttgtctgaagatttaaagaaagctaagtacgctggaactgaacaacaacatcttaagggcaagaacattgctttaatttttgaaaaggcctcaactcgtactcgttgtgcctttgaagttggtgcaaaagatcaaggcgcacatgtaacttatttaggaccatcaggttcacacattggctacaaggaatcagttaaggatactgcccgcgttttaggtgggatgtttgatggaattgaataccgtggtttctcacaacgctctgctgaaactttagctaaatattcaggtgttccagtttggaatggtttaactgatgaagatcacccaactcaagttttggctgacttcttaacagctaaggaagttttgaagaaggaatatcgtgatattaagtttgcctttattggtgatggtcaagataatgtctcaaatgctttaatgcttggtagtgcagtaatgggaatggaataccacgtagtaacaccaaaggaattgaaccctgatccagaagtattagcaaaggcaaacaagattgctgaaaaaactggagctaagattgttgtttcaaacgacatcaaagaaggcgttaaaggtatggatgttatctatgctgatgtttgggtatcaatgggtgaacctgacgaagaatgggaaagaagaattaagctccttaagccttatcaagtaaccaaagaagttatggaagcaactgaaaatccacatgcaatttttgaacactgtttacctgctttccacaacttagatacagctgttgctaagaagattaaggataaatatggcttaagtgaaatggaagtaactgatgaagtctttgaaagtccacaatcagtagtcttccgtgaagctgaaaaccggatgcacaccattaaggctgttatggttgcaactttaggtgactaaggaggaaagtttaatgaaagttgttgtagctttaggtggtaacgccttaggtaaaactccagaagaacaattaaagttagttaagcaaactgctaagtcacttgccggtttaattaaagccggacatcaagttgtaattagccatggtaatggaccgcaagttgggcaaatcaacttaggcttaagctatgctgctgaacatggtcaaggtgctagcttcccattcccagaatgtggtgctttaagtcaaggttatattggctatcacttacaacaaagtttgaagaatgaacttccagataaagatgtcgcaactttaattactcaaatcttagttgatgaaaatgataaagcttttcaaaatcctactaagccaattggtagcttttattcaaaagaagatgctgaaagaatcgctaaagaaaagggtctaactttcaaagaagatgcaggtcgaggatatcgtcaagtcatcgcttcaccattaccagaaaagattattgaactaaactctattaaaactttgattgaaaacggatcaatcgttattgctggtggtggtggcggtgtacctgttatcaaaactgaaagtggattaaagggagtgccagctgttattgataaagaccggtcaagtgccttacttgctgataatttatcttgtgacactttaattattttgacagcagtagattatgtttatgtaaattacaataagcctgatcaaaagaccttgaaagatctatcaatatctgaagctaagaagtgtattgaagaaaagcaatttgctgctggtagtatgttaccaaaggttgaagcttgcttgagctttgttgaaaaacatccagaaagaaaagcaattattacctcacttgccggcttagacgatgcactggcaggcaagctaggaacagtaattcataattaaaaacattatttttttaaaaaaggagtgaaagtaatgactagtggaattcatgtgacttctgaaatcgggaagttgaagactgttatgctccaccgccctggtaaggaaattgaaaatattacaccagattatatggaacgacttttatttgatgatattccatatttgcctattgctcaaaaagagcatgactattttgcacaaaccttgcgtgaccaagggattgaagtaatttattttgaaaaattggctgctgaagctttagcagatgaaaagattcgtcatgaatttttggaaagaatgattgctgaatctggctatattgctggtgcaactaaagaagctttaatggaatacttgggcagtatgaatgttcaagatatggttaacaaaattattgaaggtgtaagaattgaagatgttgaaattaaaaatccagatcttcaatcactttcagaagacactgattggccatttttaatggacccaatgcctaatgcctactttactcgtgatccacaagcttcaattggtaatgggatttcaattaaccgcatgacatttaaggctcgtcaaagagaatctttaattactgaatatattattaaatataatgaacgctttgctggtaaagtacctgtatggcgtgatcgtaaccacgcaactcacattgagggtggggatgaattagttctaagtaatcatgttttagcaattggtattagccaaagaactacagctgatgcgattcaagatattgcaaagaacttattcaaagattctgactacgatacaattattgcaattcatattccacataatcatgcaatgatgcacttagacactgtctttactatgattaattatgatcaatttacagttcacccagcaattttggatgaagatggtaaagttgataactgggtacttcatccaggtaaagatggagaaattaccattgaacatcatactgatattaaggaagttttgaagaaggctttaaataagtcagaaattgacttaattgctactggtaatggtgataagattatcgctccacgtgaacaatggaatgatggctcaaatactttggcaattgcaccaggtgaagttgtaacttacgacagaaactatgtatcaaatgatttattgcgtaagcatggcatcttagtccatgaagttcgttcaagtgaattgtcacgcggtcgtggcggcccacgttgtatgtcttgcccaatcgttcgtgaagatatcgattaaggagatagcgaagttggccaatcggctacttcgctatttcgcgtgaggtgtaattatggaaaaagaaaaaaagattagcagaactgagctaatcgcattgattgttagctcatgtattggaactggtatttttggtattaccagtgatgtttctaaagcagctgcaccaggacctgccttacttgcttggttatttgttggtttaggaattttggctttagttttatgtttaaataatttgtcacaaaagcgtccagatcttgaagctggtatctttagttatgcgggtgctggctttggaccattaggtgaatttatttcaggttggtcttactggctttcagcatggctaggtaatattgcctttgccactatgttaatgagtgctattgggacttttattccattttttgctggtggtcaaaatgttccttcaattttgggagcaattatcttttgttggttattaacaatcttagttaacaatggggtagaaagtgcatcatttattaacttcattggtactatttttaagattgtgccattaatcttatttgttattttgatgttcatcttctttaaaggtggaatgtttactgccgatttctggggccaagttgctaataacatgtcaaagggtactgttactggttcaattggtgaacaaataaagggctctttgatgacaatgatttgggtctttatcggtgttgaaggtgccagtgttatggctcatagagctaaaactcgtaaagaagcagaacaagcttcaactattggatttattttattagttttaatttatgttttaatttcaattttgccttatggtactttaactcgtgctcaacttgctagtgctggtcaacctgccttaggttatgtacttaagagtgttgttggtgcgtggggagcaactattatcaacttaggtttaattgtttcaactattatttcttggttgtcttggacaatgcttccagcagaaactactatgttagctgccgaagataaggcaatgccaaaagtttggggtaaggtaaatgctaaaggagctccaactacttctctttacattactgctattttgcaaacaattttcttgttctcacttttatttacacaagaagcttatgaattcgcatattctctttgtacagcagctattttattctcatacttgctagttggtttgtatcaaatgaaatttagtgctggtcgaaaagaatggggccaatttatgattggtttacttgcggcagctttccaattggcatgtatgtttttagctggttggcaggaagtattgttagtgtctattagttttattcctggctttattatttattaccaagcatgtcatgaaaataagcgtccaatttcattatctgaaaaattggttatgggaattatcttattattaagtttggtagcaatcttatttattatgacaggagtaattaagatcagttagttagaaaaataattagatgaaaaaaaagaaagtcctaaaacaggactttctttttttgttagacaaataatagcttagtatgataaaatgattaattattttattatttttcagaataggtgagaacaattaaaaaaagagcaattggaaaattagagctagttgcattaatcgtaagctcatgtattggggctggaatttttggaattactacagatattagtacagctgccgcaccaggcccagcattacttgcttggttatttgtcggattaggaattttattcttagttttatcattaaataatttatctcagaaaagaccagaattggaatcaggtgtttttagctacgctcatgaagctttaggaccgctagctgaatttattgctggttggacttattggctatctgattggttaggtaatattgcaattgccacgatgatgatgagtgcattaggaactttttttccgatttttgggaatggtcaaactattgtggctattttatttgcgattgttgtaggctgggtattaacttatcttgttaatgaaggtgtagaaaatgccacgtttataaacactatcgggaccttttttaaagtctgtcctttaattttatttctgatttttgtaacaatttcttttaaagcaggactgtttactgccaatttctggggaaatgctgttgataatttgaataatagttttaaagctggaaatttatggacccaaattagatcttctttattaactatgatttgggtatttattggaattgaaggggccagtgtgatggcacaccgggctaaaacaagaaaagaagctgaatatgcctcaatagttgccttcattttactgtttttagtctatgttttaatttctatcttaccttatggagttatgacacaagctcaactagcaaaagtagggcaaccagctttaggagcaattttaactaaaattattggttggccaggagcaattattattaatattggcttaattgtttctacgtttatttcatggctttcatggacacttttgcctgcagaatctactatgctcctagcaagggataaagttttgccaccattttggggtaaaacaaataaaaagggtgcaccaaaagattcactaattttaactgcaagcttgcaaagtatctttttgttttcactcttatttactaagcaggcttatgaatttgcttattcattatgtgttgcagctagtttatttacttacttattcgtctgcatttatcagataaaattaagtcgaaaagaaaataattggggacaattattaattggcttattaggagcagttttccaattatgttgtatgatcttagctggttggcaacaagttttattggtcgcagttagttttattcctggcttttacttgtattacaaagctagaaaatattataaaaaagcaatttcgcttcctgaaaagttagttatgatattcttacttttattaggtgtattggcaatatatttagtaattgttggtgtaataaaaattagtggataagaaaaaagcagtcattcgactgcttttttaattgagttataaaaattggaaataggaaaataattaaacagttagaataattaatgtgaaaagagattagttgaaatcaacagttttaccgttgacttcaacgctgtattcaagactttctaagtcaaggtttaacacagcttttctagtcttagccttgttttcacgaataatttgaatttggctttcactaggagtagtaatatcgatgctaccttctagatcgaaagcttcttcttcatttctgaagcgtaacaagttaagtaacttggcaactacaggacgtttaacttcttcagctacttcatcaacttcgtagtagtgacggttgatgtttctaccttccttagtttcttcaagtaacttcaagtcgttttgacctgcaagtaaaccaacgtagtaaacttgtggaataccaggtgcaaagacttgaacaagacgtgaaatgaagtacttcttgtcatcgtcacctaaagctgagtagtaagtagtgttgatttggtaaatgtcaaggttgtggtattcagctgaagagtacttacgcttaacattagcaccaaccttgtataattcgttagtggtcatatcaatttcgtcatcagctaaaatgtccttagcatcaacaacacccaaaccatcgtgagtatccaaagtagtgaattgcttcattgggctcttacgtaaccaatcagcaagacgcttagatttaccattgtaaagtgagtaaagtaataccattggtaaagcaaagtcgtaaacaaagtatccgtgttcactaaccttgaatggatacttgtagtgttcgtgaatttctggaagaagttgagcatcagtaccctttaagtcatcattagcttcttttaataagtcccaaatttctggttcaacgaagaagtcattgctatcaagcttcttaacagcgtatgcaaatgcatctaatctgattaaacttgcaccgtgatttgctaagttaactaagttgtctttaacgaacttcttagtagtttcagttctaatatctaagtcaagttggtcttcaccaaaagtgttccagatattagtcttagtgccatccgcaaattcgatagtttggtatggtgcacggtccttacgcttgtagattaagtctacatctgcttgagttggacggttttctggccaaaacttgtcccagttaaggtagaggtccttgtacttactcttatccttgttcttaacaaagtccttgtagtattcagagtgctttgataagtggttgatcatgaagtcaaacatagtgtagtacttgcttgataatgcttcaatatcactccagtcaccgaatttttcatcgactttgtcgtaagtcattggtgaaaagccacggtctccagctgatgggaaaaatggcaagatatgtaaaccaccaacagcaccctttaaataattttctaaaacgtagtttaggtccttaaggttatgacccatactatcagggtaggtaattaacattactttgttttgtaatttcataactatttactccttgtcatagcgctttcagttgattttatataacgattgtatacaataggtgatacatataaaagaatttacatatttttacacaaattacatttcttaattaacaaagtagggaggtaagattttttatgaatgccaatattaaagatgttgctcgtgaagcaggtgtttcaattgcaacagtatctagattcattaatcaaaatggctatgtggcagcaactactgcagaaaagattgaaaatgcaatttctaagttaagatatcaccccaaaaaagagttacgtaaattatcgaatacaaaagcaatcggaataattttcccatcaataaaaaatccattgttttcggaattatttacttatttagagataaacttaaaaaagaaaggatataattgcacattatttattgataatgatgaaaatcataagttggaagattatatctctttaatttttgatggccaaataaggggaataattaatagttctcctttaaaagcgaataaagtaaattaccctggaattccaattgtaacttttgatcgaaatttgggccctaatattccacttatatcgtgcaataatttggatggtggctttaaaattgctaaagctgtagtagcgaaaaagtgtaaaaaaattctaattctatctgggaatcggcaagactatttcccaattactgatcgaattaaaggaatgatgagggtttttaattatcacgatttagaaattaaaactgcctacacagatttcgaaagttcagaaatcactagaaaaattcaaattgatggattaataaaagataaaaaatatgatgctatatgtacaactgatgatataacagccttatttgttagagagcaagcaaagctaattaactatcagccaattattacaggatttgacggaactgaatttataagtcatttatttcctgaattgattacagttagacagcctacagaagaactagctaacttattagtaaaactttgtttaagtcaaattgaaaattatcgagataatattgaaaagaaatatattttaccagtcaaattgataaataattaaaaactttactttgtaagaagtcttggattaattccaaggcttttttgtttaagtaaacaatttaagaaaaatttttatttatactgcatttttaggtaaacgttacaaagcgttatatgccaaagagttgaataggttaaattatcagtatatattgatgtaagtgtttacaaaaaatgagcatagtattactatgtaaccgttaacaaaacggaagaaagaaaaaggctatgacaacaaagaaattatctttggtattcgtcctgaagatgttcatactgaagaagttttcttacaggcatttcctgaaacggtggtaaatgctaccgtaaccgtgtctgaattattaggctcagaaactcagctttacactaaagtaggtgaaagcgagttagtttctcgcgttgatgcacgtgactttacaaagcctggtagcaagattcaaatgggttttgaaatgaataaagctcatttcttcgatgcagaaacagaattaacaattgactagagttaagtgaaacgcactagtgaaagtgtgacagctatcggaatgctttattgtggaaattattttagtaggaacagaagcagttcctaagaacttaaactagtttagaaaaagtattaataaaatagcgttgataatcaaagttttgtaaaacttcgatctatcagcgcttttatttcgatgtgattttaaatttgataaatatatgaaattaatgattaaagtaatataaagaaacatcaggctctttagaaatcattttttatatctgaaaaatattaattgaaactaactattaaagaatctgaaaaatattttttatattgaagttttatattattatcaatcagcgttttactaaacataataaacacagttagatgtatcaaatggctataaaaatagcatgaataggacttgtaagataaaaaaatagacattctttataaaaaagtacaaaaacatcacgaaagatagcaattatctaatgaaaaaaagattgataaagtacgctatttttttttttttttaacatagtgaataaatcacaaatgagatttatttatgaaaaaatactaattaattaactgacttaattaatgaaaatattttcaaaaaagtatacctatagaccttgaaaattcgcgattaactgatattatattgattgcttaataatactaagcaataagcttttagtgttaaaatttggattattatgtttagtgaattgtgaaatatataacatatagatatatagtaaagtttatgtaacttttaggttgtgtttttcgccttaaaattgagtacttgattttgatgagtttatttttaattgagttataaaacaaaacgttattatttaaggaggtggtgtgttctagcaacagtttataacaatccttttgagctaagttgtttactaaaataaatcaccctcattaaaacaaccccctagatttattttagtaatttagcttagaacctttatttctactgttacttcagtagaccatgcagcaatgctgcaaaatgcgaaaataattattctgaatactcccacaagtaagataaatgaaactcccactttatttgttttgctatcagatgattattttcattcttagaaagcggaagataaattcttccaacccctatatataaaccctatagaaatagccagaagtttattctggctatttttcttttattcgattgtacaaaggcccgtatcatttctaagacgatacatcggaacaccagctttaaagagacgcttatctccacgaattttaactgatccaaataatttggagataccagtttcacacttaatatcgtaaccgcaaagattagttaatgaatttttgataaataaggttccagaatcaacatcgatatcgcaacaatctgaaacaattaacttattggcatttacagtgccagagtcacaggtgatagatgctttttcagagtgaatgtcattaaggtaaactaagccactgtcaacttgtatatcaatagtatttatcgttaagttgcgaagactgattccaccagaatcacaggtactgtttaaatgttcaagtgatggtaaacgcaattcgataattgaagttgtttcatctttagatttaaaagataaagagaagtatttctttttaataaataagttatggctagaataaatttgcttaatagtagtattttcgccaggggtaatttcaaaatcttcaggtcggcaattatgaaatctgatgctgaaggtgtcgtcttccattatttttacaaatacatcgtctaaacataaattgagtgatttcattatacttcctcttctctaaaattaatattttaattaaataatcataattatagaatataatttaggagaaaactagtatttatttattcaaagtaataaatttacatttaaattaaattaaaagcacgagtgcttttttaagcactttttatcattaattggtataataaacttgtccacagtagatatgtggatggagaaagtttcctgtatttttatcacctcctttctatattattatttccttttgtttcaaaaataggctacccatttgggtagcttttttagtgctattattaaataggtgatggaataatgaaagaaattgaattaagtaagaatctttttgttgtaaaggctagtgttgttaattttccatctgatgcaattgttaatgcagctaataaaactttactaggtggtggaggagttgatggagcaattcatcaagcagcaggccccaagttacttgaagcttgtaaaaagttacatggctgtgagacaggacaagccaagattacatattcctttgatttagcaacttgtaaatatataattcatactgtagggcctgtttttaaattgagccagtcacctaaaaaagaattacaagcttgctataaaaatagcctagatttagctatgaagtataaatgccgttcagttgcgttttctggcatatcaactggagtatatggctatccaattgatcaggctgcaagtgttgcaagtgaagttgtaaagcaatggcttgaaaagcataactttgcaattaaagtgattttttgttgctatagagactcagagtataaagcttatacaaaattaatttaaaactattaaatattcaataaaaaggcgtaaagccttttttcttttttgataattcgtatataccaatatcaaaaaagaatatagatgattatatgatataaaagtaaagtgaagctataccaatttgacaatagcttatttagagaccgtaaaatagtttgtgtaaggatgaattattccttaatttaatttcctaaaacattagaaaaaggagttcctttctcgtatgattggtttgaacaaaaaaaacatacagaaagaagaactccttcatgaatgattttaccaaaaatataactcaagctctattcaatcaagataaaattaatgatttgcttcgtcatgaaatccaacaagctgttaatgacatgttagaatctgaactgactgcctttttaagatatgatccctatgctagaaatggctggaatactggtaattctagaaatggtgcgtatttccgtaaaattgatacccagtttggatcaattgaggtacaagtgccacgagatcgcaatggtatgtttcatcaacacactctgccagactataaacaacatactgatctcttagaagatatggttataaagctttattctaaaggtgtaaccactagagaaatagctaatttgatcgaaaaaatgtatggcagtcattatagtccagctcaagtgtctaatatctctaagcaaatgattcctaaagttgaggcttatcacaagcgtaagctgagcgataagttcttttgtgtttatcttgatacaacgtatataccgttgcgtcgagaaacttttgaacgagaagcagtatatattgccattggcatcaagcctaatggtcacaaggaagttatcgactactgcattgcgcctagtgagaatattgaagtctggacggcgttgctccagaacatgaaatctcgtggtttaaagcaagtagagcttttcctttcagatggcgttgtcggcatgaaagcagcactggcaaagacctatcctcaagctcatttccaacgctgcttggtccatgttatgcgcaacatctgcgctaaagtacgcgtggacgatcgcgaggcaatcatgaacgaattcaagcagattcaccagcaagccaataaagcggctgctgttgatgtattgcatgctttttatgccaaatggaacaagagctacaatcgtgtcattagaaacctgaaagacatcgagccagacctgcttgttttttataattatcctaagcagatcagggcttcaatttactctaccaacatgatcgaatcctttaataacgtcattaagcgcaaggctaagcctaaagcggagttcccgactgaacagtcgcttgatacttttattggcatccaagcaatgagctacaatgaccgctacttcaaccgaattcacaaaggctttggtcaagtccaggataccttagaatcctattttgaataaataaaacgttaaaaaaacaatttacgagaaagatctatttacacaaaaaatttgacagtttccttatttatatattaaaattttattcattgttattattaattgttaattagtttgacaatagattaacttaaggagataaagacatatggataataaaaaagacctcgataagtctttctttggacaacccagaggtctcgctacactgttttacacagttatgtgggaacggtttagttactatgggatgagagcgattctaatcttttacatgtattacgcaattgaaaagggcggcttaggaatgtcgcaaactttagctgcgtcaatcatgtcaatttatggatcacttgtttatatttcaacaattgccggtggttggctagctgaccgtatatggggacctagaagaacaacctttattggtggggttctcattatgttgggacatatttgtttatcactaccatttggtgcagctgcgttatatctatctattgcatttatcgttatggggtctggattacttaatcctgcttcaagtgcaatggttggagatttatacgaagagaatgataatcgccgtgatgcgggatttagtttatttgtttttggtattaacttaggtgctgtaattgctccgattgcagttccttgggcagctagtgggtttggattacatcttttcggtaatgaaactaatttccatgctggtttttcacttgcagctattgggatgttctttggcttattacagtattggttcgatggtaagaagtatttaaatgaaaaagactttaagccaaatgatccgcttaatgaaaatgaaaagcaaaagttaactaaacaagtattacttggagttttagcattaattattgttttagctataatgttcttcatgggtagcttgaatattgatggtattattaacttaattacagtaattgcgattgcaatgccagtaatttactttgttatgatgcttagaagtgataaagttactaagattgaaaagaaccgcgtattagcatatatcccattatttattgctgctgcaatattctggggaattgaagaatctggatcaacagttttggccctttttgctgctaatagaactgtacttcatttaggtgcttggcattttgaagcagctaacttccaagtcctaaatccgttatttattatgattttaactccagtgtttgtagcactttggaataattggaagaagcaaccatctgcacctggtaagttttcaggcgctttaatcttcgctggtctttcatacgtttggatggctattccagcatttatttcaccagatcatcgtgtaagtccattatggttagttggttcatggttcttggtagaaattggtgaaatgcttaattcaccaatcggattatctgttactactaagttagctcctaaagcctttaaatcacaaatgatgtcactttggtacatggctgattcagtaggtcaagctgtaactgctcaaacagttaagctttacactcctaagacagaagttcaatatttcttagctgttggtattgtaagtattgtctttgggattattttaatgttccttgttaaacgaattcataatttaatggaaggaattgattagataaaaaacctcaccttgaaaagggtgaggttttttgtttataaaataaaatcaaattattaacgagcttcaattgatgttaagaagtcagctctttgaaaggctgggtttggatacttgtaaaatccttggccagcttcaatgccgtagtgtccagcatcaatcatgtctttcattgtttttgctacttttaattcttcaggcgtgcgagcttgttgtgcaaaaattgcataaacagtccggattcccaccatgtccattgacataaatgggccaaatggacagccagttgaattcatccaatctttatcaattgtgattggatctgcgacaccatttgcccataattcaagagcagcatttaagaatggtacagataaagcgttcataatgtaaccatgttgctctttttggaggtgaacaggtaacatcttgatagccttggcaaattcaattacttcttcgataacttctggcttagtcttatcagtaccaacaatttcagcagtattgttagtccaaatgtggttagcaaaatgcatgtgcaagaacttatcagggcgatcaacatagttgactaattgacttggtaccatggttgatgaatttgatgcaataatggtcttttctggtaaatgtggacaaacattgtgataaaaatttgcctttacatttaaactttcagggacagattcaattaaataatcacaatctttaaatggaatttcccagtcattggtaattgaaagaatatttgacattgctttatcaaattgttcatcggtcaatcccatatcttttttataaaatgggcgaagtgcagctaaccgccgcttagctctgtctgggtgtggattccaaattctaacattaaagtcgcatagagcagtttgaaaggcaatttgactacctaatgttccagcaccagcaatagtaatatttttaaacataattaacgccttactttcctaaaatagcttggtcatagcggccagtaattaaatatggtgcgatttcatctggttcaacttgggcaagttgaattgtttcgtgcattttgccactagtcatttggtagtgagcgccaccaactggctttaatacggttaattcgctgactggatcatcgctacttgtcccaagttccattgtaatgttgcctggagtgaatgcgtgggtgacacctgttgtcttagtagcaattaaacgagtgttaatgaagtggttgtgaccgtcatggtcttgatcaatcttatagtcgaagaaaaaactataagtatcggttggcgtatcaagcttagattgaccacccattaactgtttagcgatgtcaggatcgttgggaatacctggagtaaaggtaagattaattaaatctacaccatgtctagtaacaacaacatgggtgctgccatttttttcagtgtagctaattttatcagctaacttctttggaattgcagctccttcacgaccagcaagcatggcttcttcggctccttcaccacttaaaaatagggtgaaaggataagcgccaagcatgcggccaccgtatgaaactaaactatataagacagcttcatcataaggcttagcaaaagttggattgcccatatgggtaatataaccagcgatgactggtgcgataggcgttaatggcttaggcactaatctagctaaaacttctggtgaagtgacgtaggcaaacatataaccatcttgatttttcatgttaggattatcaagaaagttgacaacatcttctttgttaacaagataactagtcataaggtaaatacctcctttttagaaaaaatatgtttcctgcttacaagaatatctaagcactttttcgataaaatgaaagcgttttaattatttttaacacaatattttgctagatgtatactttgtaaaatacttttatcaaaatagtgctatgatatggctagataaaaagtaaacattttcacaaagaggtagtaaaaatgacagaaatagaatttgaaaataatgatttttctagtgtaatgcttaatcggcattctgtaagacattttgataaaagttgcaagattgaccggagtgttttgaccgaaatggtcaaagaagccacaacagctccgtcatcatgtaatttgcaagcatggcactttgtagtagttgatacagatgaaggcaaagaaaagttacgaaaaatttttatgccgtttaatcatcctcaactagacacttgttcagcaatggttgttctttttggtgatacagatgcctttaagaagtatcgtgatttatggcaaggaatgtatgaagaaaagaaaattaccaaagaacgtcttgaaactattttaggtactttcttgccaatttatgaaaaggcagataggaccttgttaactgcagatgcgatggttgatgcaagtttagcagcaatgcaatttatgcttgatgctagagctcgcggttttgcgactaatccgattgctggatatgatgcaactaagatggctttggcaatgggacttgatccagttcgttatgttccagttatggcgattgcgattggtaagccagatgaaagtaagcaagaacttgtttcaactcgctacgatgttaaagatgtgctggaatttagatagatacgtagataaaagagtaagatattatcttgctctttttttcttaaatataagctatactgcgtgctataattaaggcatcttaaaatatttatatatttattttggccatagtacagaaaggtacattatgcgagttaatattttacaacatacacccaatgaaggtccgggagcaattgcagattggtgccatgatagaggacatgaaatgtatgtttaccacccatatcaatttggtaaattacctgaagctagtgaaactgacatgctagttattttgggtgggccaatgagtcctaatgatgatttattttggattaaagaagagcgagtattaataacccagttgctagctagtgatacaccaatatttggggcatgttacggagcacaacagattgccaaagttttaggtagtaagattggtaaggcaccacataaagaagtaggttgggcaccagtttatttacaaaatcatgtaattgatggattacctgaaaaaatagtagccttacactggcatgaagaaatgtttgaaatccccactggagcgcatttactttactcaagtgatttagttaaaaatcagggctttgtatttggcagtcacgtaataggactccaattccactttgagccattagcagataatgtacgtgaaatggtagtaaatgatggggaatatgctttacaaaataatgatttaaagcaaagtccaagtcaaattttgcaaaagcaggttccatcagaaaataaacaaattatgtacaagttgttagattttattacaaaataaaaaataaaaatcgttagcagtatggctgacgacttttttgtataatgggattaaaaaaggaggtgctttcgtatgttgaaattaggagttattggcacaagttggataagcaaacaattagttgaagccgctcaagctactaaaaagtggactgttacgtctgtttattctcgctctcttgaaagagcaaaggaatttggtgagccgctaggaattgagggcttttttgatgatttggaatcatttttttcaaaaggtaatttcgaagtggtttatatagcttcacctaattcgctgcactttaagcaggcaaaaatggcaattgagcatgataaaaatgtaatcgttgaaaaacctgcttttactaagccgaaacaatatgatgaaattgcagagttactagatacgcatgactgccactttattgaagctgctcgtcatattcatactaagatttttagaaagttaactgatgaagtcaagaaattaccacaagttgatggggcatatttgaatgtgcgtcaatattcttctcgaatgcatactttaacccctggtcaaaaaccagcaaatgtttttaaaccagaatttgctggtggagccttgatggatattggggtgtatggcgtctatgtagcggtttccttgtttgggatgcctaatgcttgctcatataccccagtacttcataaaaatgaaattgacgtttcaggtaatgcactacttaagtatgacaacttttttgtaaatattgatattgctaaaaatacaatgacttatcaagggtctgaaatttatggcagtaaagaagtagttgggatagattcaattttggacatgcataaagttgcttattatgatgcagagggcaaaaagcatgccagccggattaaagtgcctgataatccactatatgaagaaatgaatgagtttgcagacttatttattaatccagatgaaaaattattcgactactgggtactttctgctcaagttggggaagtgttgaacacacttcgacaatctgccggtattaagttcccagatgattagaaatatattgaagctaggcgaaagcctggctttttttgtggggaataaaaaataaattccataatgaatatgttaaaagctttttagttgaactatactatatgtgaaatcgcttcctagaaaggaaatgagaatatgacactagatatctcaaaactagaaactgagcaacccaatcctaaaactaggaaaattgatgaatgctcaactgatcagattttaaagttaattaatgatcaagatcaaacaatagcaggtgtcgtaagaaaaactattccgaaaatcggacaaatagttgaggcggcaacaaatgctataaaaaatggtgggcatgtatattatgtcggagctggaacatcaggacgattaggtgtattggatgcagcagaatgtcctccgacttatggagtaagtcccgaattatttcaaggtattttagctggaggcaaagaagcgatttttgttgctaaagaaggtgttgaagatagcgaaagcaggggaaaacaggccttagttgagcataacttagctaaaagcgatttagttattggcattgcagctagtggaaggacgccatatgtaattggagcattgaagtatgctaatgatgtcggagcaggcactgctagtattgcttgtgtaaccaattctgctcttgctcgttatgccaagattgcgattgaagcagttacaggacctgaagtaataactggctcaactagaatgaagtctggcactgctcaaaagctaattttaaatatgatttcaactacaacaatgattaagcttggtaaagtctatgaaaactatatggtagatgtttcaccaacaaatcaaaagctggaagtcagggcttgcaatatgattaagctttttacagatttagatgatcaagcagctaaggacttgtttattgctagtcataaggaagtaaaaactgccatagtgatgtatttgaaaaaagttgattataagcaggctaaggttttgttagataagagtcaaggtcatattcgtcaagcgattaaggagtaagaaaatgaaaaagagaagcagtttatttatattaattatcttaatgctctctttagttttaacaggatgtacctctaataaagatgcggctaaagctaaagcagcaaatcaaagtcaagtggttacaactaccttgtattctaagcatttaggtattgattggaattatgatgtttatttgccagcagggtataatcctaaagctaataagaaatatccagtcttatttatgcttcatggcttgtatggaaaccatcgcaacttgttggagcgttttaattcacaacagattattgatggtttggtccatagaacaagtaaaaagatgattgttgttttcgttgatggctttaatagtttttatgttaaccaaaaaggcggaatgcaaatggaaacagcgataattaaggatttaattcctaagattaatcaaacttataaagtagctactaatcctaatcaaagagcaatcggtggtatttcaatgggtggttatggtgctgccagattagcactaaaatatccaaatcaattttcaaaagctgttatgatatctccatctgtttggtattcattagctaaaggtaatccaattagagctaatatgcatgccttcactgatggtaaaactaattggtcagaccaagtttataatagcgaatttccaacaaaatatatcaacaataaatcaagaaatgtaaaactttatattgaaacaaccagttctgatactacggtacctgtcaaagatgtaaatcattttgttaatgatgtaaagagccagggtattaatgtgaagtatgttaaagactcaggtgataaccataactggacttattggacaaaagcagcacctaaggcttatgcatgggctattaaagagcttaactaggaagaaggattcaaatgtcagatcaagaattggctaaaaagatcctatcacttgtaggtgggaagaaaaatataaaaaatgttgcatcatgtatgactagattacgcctaagtttaaatgatgtaagtcttgcaaatattgacgaattaaaaaagctggatggagttttaggtgtagttcaagcagataccttacaaatagtgcttggtcctggaaaggtaaccaaggtagccgagcagtttgctaagctggttcaacaaaaattaagtcaaacgcaggcagatgatgcgttagacgaggttaaagcacaagctgctaagaataaggctgaaaataaaaagaaacatgataagcctttgcaacgtggactacaacatgtggctaatgtctttattccattgttaccagggattatcgctgccggattaattaatggaatttgtaatgtcattgattttcagacagggtcagcttttgctaatgactggtggtatgcaactattaaaacaattggttgggggatgtttgcctttttgccattgctagttgctatgaatgcggccgctgaatttaagggtagtcgcgttttaggtgcaattggtggtatttattgtttgaatttggggataacaacttttccactggcatcgttagcattaaatatgccatttactaatagtccttatgttgcaggtgtaggtggtattttaacagccctgttaatcggcttcttcatagcctttgtggaaaagtgggtcagaagctggatgccagacatgctagataccttccttagtccacttattacagttatcttctgtggattaatcgctgttgtcttcttacagcctgttggttcatggctaactaatatcatctatgtagttatggacttcttctacaacaagctcagttggtttggtggatatatcttatcatcaactttcttgggattagtatctgttggtttacatcaggccctaactccaattcatattatgcttaatgatccaactggtcctactaaaggaattaactacttactgccaatattgatgatggctggtggtggccaggttggtgcaggtcttgcattattctttaagagtaagaataagcgtttcaaaaagttagttatgtcatcaattccagttgcagttttaggagttggtgaaccattaatgtatgctgttactttgccacttggtagaacttttgtaactgcgtgtttaggtgccggattcggcggggtcgctgcttcattattccatttgggaactgtttcccaaggggtatctggtttatttggtttattaattatgcagcctggtcaacaattacagttcttgattgcgctattaatagcttacttagggggatttataattacttggttcttcggtgttgatgaaggacgaattaatgaactatttcctgagaagtgattttttgtttttttaataaaaaggattcagtcaattctgaatccttttatttatatttaagttataggataatttaagtatgctaaatatatagcatgatttattttatatggagggaagtctttatgaaagaaataaaagactacatcattggtctcgatatcgggacaaattcatgtggatacgttgtaacagacaaacaaaacaatattttaaagcttaaaggtaaaactgctattggtgcacgcctttttaaagaaggcgaagctgcagctgatagacgtgcctttagaaccactagaagaagattagcaagacgtcgctggagactaagtttacttgaagaaatctttgatgaagaaatgaacaaggttgatccaagtttctttagaagactaaaagagtcagattattctcctaaagatagacgtaagcaatttaattcaattgtttttgaaagtagtgaagcagataaggctttttacgaaaaatatccaactatttatcatttgcgtaatgctttaatgcatgataatcaaaaacatgatttgcgagaaattttcttagcagttcaccatattgttaaatatcgtgggaactttttacgagaagattctgttaaggcttttaaagcagctaaattcactttacaaggtgaagatggaataggaccagttgataagttaaatgatttgttaaaagaaatttatattgaagctgctcctgaacttgcaaccgacaatctatctaagattgaagatattatcaaagataagaagttgtataagcaagataagttaaaacaaattgctaatttgttgcctaaagctgttgattctaaggataaagctaagcttaataaagatattgccaaacaagtagctaatgcttggatgggctatatgtttagattagatacactctttagttttactgatgttgatgtgaaggactataaattaaaatttagcgatgctaatattgatgaatctttggatgctttgactagtttattgacagatgcacaaatagaatttgtattagaactgcaaagcatttataatactatagttttaaatgaaattgtcccagatggaatgagcctttctgaatcaatggttaagaaatatgatgaccataagaaagacttgaagttatataaagaatatattgattctttaagtgatcagaaaaaagctaagcaacttgaagcagcgtatgcgttatatgttaattatcgcaaggcagatttattagcagctaagaaattgtttgaaaagaagaagataggggataaaaagtttgtcgatgtaataagtaacttcgaagtatttggcaaatttgtttctgataatttagatgattcagaattggctaataagattaaggctagacttgatctaggtgaatttttaccaaaacaaagaaccaatcaaaatggagtaattccatatcagttgcatcaagttgaattaactcaaatccttgaaaaacaaggtaagtattatccatttttgattacacctaatcctgttgaaagtcatagaaataatgctccttatgaaattagcgaacttgtatcattccgtgtgccatattatgttggaccattaattgataatcaaagtatcaaagataaacaaaataaaaataaatttgcttggatggtgcgtcaaaagcaaggtcaaataacgccttggaattttgaagaaatggttgatactacagaatcagctaatcaatttatcaagagaatgacaaggaaggatacgtatttattagctgaagatgttttaccaaaatctagtttaatttatcaaaaatttatgatattagatgaattaaatagaataaaaattgacggcaaaaaattaacaagtaaactaaagcatgatatttttgaaaaattatttaagaagcaaaaaagcatcaatttagataacttaaagaattatttattagcagagggcaatattccaggtttgattgagggcctttctgatggaattaattttaacaatagtttttcaacttatattgattatcgtaatatctttggtgatgagattgataatcccaataagcaagctgacttcgaaaagatgattgaatggtcaactgtgtttgaagaccgtaagattttcaagcgaaagctaaaagaaattacttggctaacacctgaacaaattaaacaagtaagtagtaaacgctattcaggatgggggagattatctaagaagttattaactcaaattacggatgaaaatggtgttaatatcttgcaaagactctggaatgaacctgaaactttaactgaagttttagctaatccggttataaaaagaaaaatttcggaagcaaatagcctttttgttcaaattaataaggttgaaaatattttagatgatgcctatacttctcctcaaaataaaaaagcaattcgtcaggtaattagagtggttgatgatattattgccgcagctcatggtaaaaagcctagccaaattgctattgaatttgcacgaagtagtcaaaataaagctaaagtgccagacacacgaaaaaagcaacttgataaaatttataataaaattagttcagaaattttagattcgtctatcaaaaatgaattaaagaatttgaaaagcaataagtatttatccaaagataaactatttttgtatttcaaacaaatggggagggatgcatatactggtgataagctttctcttgatcagcttcaaaattacgatattgatcatatttttccaagatcttttattaaggatgattcattagataatcgtgtattaacgcagaaaccgataaatgctaaaaagtcagattatggtattccagctttggaatttggcaataaatatgttcctgatttggggattactgtaaaggaaatgtggaagctatggcaagaaaatggattaattagtaaatctaagctaataaacttatgtactaatcctaaaaaaattggatcgaaaagagcttctggatttattaatcgccaattagttgaaacgagtcaagttattaaattagtcgcaattatactgcaagctgaattcccggatactgaaataatagaggttaaggctttacaaaatacaactcttagggaaagttttcatttatataagaatcggtcagtaaatgattatcatcatgcaattgatgcgtacttaacaacgatagttggaaattatttatatcaagtttatccaaaacttagaccatattttgtttatggtcaatttaaaaaatttaaccaagaaaaaaatattgatatacttaaacgactaaagaattttaatttcttaaggcaattgatttttaacacagatgataatatctatatttccggaactaaagaaatagtatttaataaaaaagatattatccataaactggaaactgcttatgggtataaatatatgaatatctcacgtgagtgttatcaagaaacttcaagtttatttaatcaaactctttatgcacataattcaagtgtaaaaaatagtttaattcccaaaaagaaaggattaccaacagaaatttatggaggttatagtggaaataaagattctttttttgtcttagttaaaatagtgaaaaaaagaactaatctttatagaattgttggaattcctacaagagaattagccaagcttaactcatcaaataattataatcaagctttaaataagattgttgaatcgaaactctgcttaaaggaaaccgaaagctttaaaatattaattaagcgattattatatggtacgttaattgttgacaatggccagaaatttagaattggcagttttaaagaaaagcataatgttcaacagttggtattacagttaaagtcgatgaagtatattaaattttatatcgatggtggccaaaattattttactgatgtagagcgaaaaaaattagaaaagcaagacagagataaatgtttactatatgtatttgatgatattatgaatgtagttaataaacgttttactttatttgatatgtcaaaatatgagaaagatggtgattctctaagagaaaaatttaattgcctggattttaatgataaagtatcaatattatcagatttacttaaagcatttcatgctaattctgatcggactagtattacaaagttgaaaattacaaacttgggtagacatcaggccggaaaaaacggaattacattaactactaatgcacaaatcatatatcaatcaccgactggcttatttgaaagacgcattaaaataaaagacttatgattaccacatatatggaaaaaggattacacttgaattaggtgtaatccttttttgctacaaaaaaagaccgctataagcggtacacatgtgaaaactcggtactaagaccttgtttgattttaaaaataaggttgttaaatcagtaaattgaaatattgaggttgttaaatcaacaactaaataataacattttcagatttagttaacaaggggtgaaaattaatggcttggagaaacgtaattataacgcaacatgcaaaactatcttattcatcaaatatgatgcaagttcaaactagtaaaggaattacacaaattccactttctgatattgcattactattagttgaaagtactcaagcagttattacttcacagttaattagtaaacttgctgaacagggatgtaaggtgatttttgttgataataaatataatccgattacggagactgtaaattattatgcacctaaatgtaattatcaaaacttgttagctcaattacattgggatgaaaccttaaagcaaagactatggaccgaagtagtatggctaaaaatgaataatcaacttaatgtcttgaagaattatcacttaccaacagaaaaagtagagcaagaaatcaataaattagagtttaatgatgtaagtaaccgcgaagctgttgtagctagagaatatttccaagaactttttggaaagagttttgtcagacaagatgaaggagatactattaatgcagctttgaattatggttattccatattgttatcatcttttaatcgtcgcattgttcaaaatggttatgaaacatatttaggaattcatcattcttctatcgccaatcaatttaacttagcatcagatttaatggaaccatttagaccttttgtagattattgggtagcaggacaaaaattaaaagattttactccagatgtgcgatatggattggttgaattgcttagtttacagattaaatataatgggaaagccatcctcctagctaacgcaatagatttatttaccaaggagtgtttaggctatttaagcaatgatgtggataaagtagaaagcgtgatggattttgtcaatgaggtaccgaaccatgcgattgctgataatgtttgatttgcctacagaaacggctcaagatagaaagaattatcgcatatttagaaaagaactgattaatgaaggctttgtaatgattcaattttcagtttatgtgagagtttgcgtaaatcgaaaaatggctatttttttagaaaatagggtgagaaactttttaccagaagaaggattagtgcagtcattaatgttaacggaaaaacaatataacgatatgcattttttaattggtgaagcagtagatgatgtacgtaacacttcagacaggacggtgattatatgattattagttatgaaggacatcatccgattaaagtatcagatggtaaaataacttttataaaagtagctaattctgcagtttatcgtgatttcattctttcttttcaagggaaaagtgaaaaagtaaaattttttgatgaacattacaatcaacttgaaaagaataaatctattgactgggttggagatgttttaattacacaggattatcttaattcttatcagaataagattatttcaaatctgtttgatactttaaatgaaaatcagagaaataaaatatttaatacgtggcgtcagctgagtactgatattcaagatataatatttatgactgatttaccaattgaagttggtgaaaatctagatttaaagaagctattcaaatttgatggaattcattttgatgattctgtattaagtgatccttatgctataattgaaacagttgttaaaattcatattgaatgtaaattgaattcggttgttacttttgcaaacgtaagtcattatcttacaaaagaacaattgaataacttaattacctttataaacgaagtaaatatgcctttgatattaatagaattttcatcttcagattttaaggttgttagtggggatgcaagagtctgttatattgatgaggattttgtcgactggtactgattttaaatctgagaagctgatgataaaatgtcggttttagaaggttgttaaatcagtaagttgaaaaactaaaattttttctatcaaataccacatgtagttttagaaggttgttaaatcagtaagttgaaaaactcccacagagcttagagcgcaaagtgctgagttttagaaggttgttaaatcagtaagttgaaaaacaaaggattttgacccaaagaaggataaggtgttttagaaggttgttaaatcagtaagttgaaaaacagtatttatcgtcagttccaagatatttctgttttagaaggttgttaaatcagtaagttgaaaaactttttatccttccttgaatcatattgtttagttttagaaggttgttaaatcagtaagttgaaaaacttctgtggttgttaaggtatcaatctcactgttttagaaggttgttaaatcagtaagttgaaaaactaaatttcgcaatgaaattgactatgaaacgttttagaaggttgttaaatcagtaagttgaaaaacagtttcaaattgttgatgacattgcagaatgttttagaaggttgttaaatcagtaagttgaaaaacaatttctttaatttccggaacaccagcaatgttttagaaggttgttaaatcagtaagttgaaaaactgataagtttcccgagactaacgttgacaagttttagaaggttgttaaatcagtaagttgaaaaacttttagcaacgaggaagtagacaatgactagttttagaaggttgttaaatcagtaagttgaaaaacaatggcagatttcaatcaaataacacttaggttttagaaggttgttaaatcagtaagttgaaaaactgtaacctgttactgatggtgctgtatattgttttagaaggttgttaaatcagtaagttgaaaaaccgcgaccagagtcatcggcagttgtatagtgttttagaaggttgttaaatcagtaagttgaaaaactgtttaaagtagtaaacaagactattgagcgttttagaaggttgttaaatcagtaagttgaaaaacaaaagtagtcgatgaatatttaaggttagtgttttagaaggttgttaaatcagtaagttgaaaaaagtaacaaaaaccaatttaattaatatgatcatattttaatttgaggagaaaactaagtatgtggacatttcttaaattttttcagacaccagtaggctatttaattggaatggctattcttgtcatattgcaatacgtgtatgaatggataagagacgagcgctaaaatattgtttggtttattggcaattaatatactttagaaagctgcaaaacactataacttataggagataaaaatggaaggtttagcatatgttattctatttataggagcttttatatattactattgtaaaaataaccgtaaaaaataatacgatttttaaaagttactgagggggcataatatggatgcaattattgatttctttactaaccctatatggattacatttataacaattttatatttttctatggagtttatagaaaataagcgaaaaaaatagcgcttttttattggtaaagtaataacaattatgtcagttttaaaagcttaatagattgaaaggactaaaaacatatggatgaaataaataaaatagcaattgaagtaggtgcagaagatatgattaatcgaccttctttggtaaaagcgcaagaactttttcacgataaaactttcactatgcctttaattgctaagtatacaggtatttcaattagtcgcttgaaaaatctatccagtggtagaactcctttagatcaattacctgaagctaatttattaaaactagcaaaatttagtgatacttgcgaaatttttagaaaactagctgaaaaaatagtataaaacttttatatatgtagaaaatttgaagttaaagaataaaaagattatcaaactataggttatataaggagtaactattgaagtatttcgctattttacacaaaaataaaaataatcaatttgaagtaagttttcctgacttggcacctgcagctgcaacttttggagatacattagaagaagccattgaaagtgctcatgattctttgactggttatttgttaacggctgaagactataatgaagtagtaacagctccaacaaataacccatctatttttaaaattcaaggttctgatatcattgtacctgttgaagtaaatttagaatttgaacgtattaaagaacaaaataattagaataatttgtatatttttgtatattatagcagtgcaatatctattgactatagatatttaaaaaaggtaatataaaaagggggggtaagccttaagcctagcccctgaaaatctattacttagtcattttataaattattaacagttgtgtaattataattagtaatttaataacaatgtctaagcagtcttttataacggctaaaacggctattctatagccgtttttatttttgcgctttttgttttaaaagattgttaaatccataatttaaccaactccactcttttttagagcggagttatttttttctctcaacttaatacaaataccaaaaaactttgaaaataatgctaattggtctatacatgaatattgactaattaataaaaaaatagcaatatataagtgtagttagaaagcggttacatagtaaaaagaaagatatttcttttagaggatttttatggaccaaagaaaaaatgcaaacgtattatggtttgatgaattaaagcgtgaagatgttgatttagtcgggggaaaatcatcttcacttggtgaattaacttcaggaactaatgtaccagttccttatggctttgcaactacagctgcagcatatcgctatttcatgaaagtaactggattaaatgaaaaaattaatgcactacttaaaactttgaagaatgttgatgactcagatgaactacataagatttgtagtcaaattagaaaattaattgttgctgctaagatgcctgccgatttagctaaagaaattggtgacaattatgataagctggcaatgaaaatgaaggtaaatgaaccattcgttgctgttcgttctagcgcaacagctgaagatttacctgatgcatcttttgctggacaacaagatacatatttgaatgttcatggacgtgataatgttattcaaaaggttaaggaatgttacgcttcaacctttactgatcgggcaacatattaccgtgtaaagcagggcttcccacatgaaaaagttgctttatcagcagctgttcaaatgatggccttttctaaggctagtggtgtaatgtttacagttaatgttgctactggcgattatactaaggttatgattgaaggctcatggggtctaggtgaatacatcgttcaaggtactgtaacgccagataactttgtggtagataaagcaagcggtaagattagcgataagacgattaataataagaatgtggaacttatccgtttacctgatggtggggttgaagatcgtaaagttccagaagatattgccactaaaccttgcttaagtgatgaacaagttgaacaattagcaagttatgctaaagagattgaaaagcactatggctgttacatggatatggaatggtcattagatgaaaatgataagttatggctagttcaagctcgtccagaaactgtctggtctcaaagaaaaaaggccggaaaaatgtctaaggatactagtgatgaaaaattgactactgatcataaagttttggttagtggtttaccagcaagtcctggtattaaacatggtatcgtccacgtaattgaaaatcctgaagatattgataagtttaaggatggcgaagtattagttactttgatgacgtctcctgactgggtacctgcaatgaagaaggctagcgctatcgttacaaataatggtgggatgacttgtcacgcagcaattgtttctcgtgaaatgcaaattccatgtattgttggtactgcaagtcgtggtgccaaggcaaccgctgttttgaaagatgggcaagaagtcactgttgatgctaaaaatggggttgtttaccagggcgttgttgctgatatggttaaaaagccagaaaagcaggtttcagctcctgcagctgaatactttgccccaactgctactggcgttatgatgaatttaggtgatcctgatttagtcgaccgctacaaagatttaccttgtgatggaattggcttgatgagagaagaattcctatggactacttatattcaccaacacccattatatttgattgaaacaggccatcctgaacgagttgtaaatgaattggcaaatggtattagtaaagttgctcgtgcgatgaatccaagaccagtagttctacgttttagcgattttaagagtggtgaataccgcaacttaaaaggtggcgataaatttgaaccacatgaaagtgctgatttgttaggctggcgtggagcatccagatattatgatcctaagtatattgaagcctttaagttagagttagaagcagtcaaaaaggtaagaaatgaatatggtttgaccaatttgaatgtaatgattccgtttgtcagaactgttgatgaattgaagaaagttactgaaattatggctgaagctggcttgaggcggagtaatgacttcaaggtttatatgatggctgaaattccttctaatattattttggctgatcaatttaaccaatatatcgatggatactcaattggttctaatgacttaacgatgcttttacttggttgtgatcggaataatgatactgtatcaagcttatttgatgaaagaaacttagcaattaagagagcaattcgtcacttaattaagacagcacataaggatggaaagactgtttcaatttgtggtcaagctccatcagaatatccagaatttactgagtttttggtaaagagtggtattgattacgtttcagtaaatccagatatggttaaagctactaagcgtaatgtagctcgctatgaacaaagaattattcttgaccatgcgactggattaggtagagctgacactgaggattatgactggtaataattaaatagacaaaaaggcgacctgaatgggtcgctttttttatgataatattatatgaataagaattaatgggatggtgctttgatgattaaagagatagttaaagatgaaatgcttttaaaaagaaagtctttgccagcgactaaggcggatttaccgattggacaagatttaagagatactttacaagctaataaagaacgctgtgttggtatggcagctaacatgattggatattcgaaaagagtaattattgttaatattggcttccttaatgtagtaatgtttaattcggtaatacttgaacgtaaggatccatatcaagttagtgaaggttgtttatcattatctggaagtcgcaatacccttagatttaaagaagtgaaagttgcttttttagatgaaaaatgggaaaatcaagagttgactttgacaggttttgcggcagaaatttgtcaacatgaaatggaccatctagaaggaatattaatttagcattttataattattcggggtagaattattgataaaatgctttggaggttaaaatgaaaaagttgaaagagaaatacttcagggaattattaccgtattctctgattttcttggtaataattgcaactctatatgtccaaattgctgtgcattcaaccaatatgggtgctgataattatttccattttgcgagattttatgacataaaagcgcaactaatgacgggaaagtttaattggttccagactaactttactttcgagcaaactggaaaagtcatcaatgcgctgtatggtcctttatttgcttatctcaatggtatgttgttacttgtagctaagacttggtatcaatatgaagttattaccaatattttgctaaatttcattgctgctattgggatgtataaacttgctcaaaaagttaaagcaccaaaaaatgtatctgtaatactagctttattgtacataaatactggtatgattccttcctggattgaagggatgaatttctctgcttggggtggagtttttattccttatttattgatccaggtagtaaatctattagaggataaagaaaagccaattcacgttgttggattgatgacatgcattagtttaattgctaatactcatttactttcaacattattgatagtattggttttagcaccagtagtattaatttcatttattaaaactcaagataaaaagtcttttatcatcgatttacttaaggtggcagttggaaccataattttaactgctagcgtttggggtggattattagtaatttattctcaaaatactatagcgactccatattcagttaacatgggaatgtttacaattcatttatcgcatttccaagcctttagacagtttatttttccaagtgcacttctactttttacaggtcagtttatttatgctgtattacattgtaaaaagcaatttaataattttgtagttacttttataggatattgctttttattaattggctctaaatggttccttgactggaattggattcaaatgaaattaccaattatttctggaattttccaatttcctttccgtctaacatcagtagcatatcctttaattttattgggattggcatatacctttgcgacaaatgcaaagcaaaagaaatcatataaagaatggaattatgcagtaatattttcaatttttgttatggttcaagcctgtttttcaacatataaagttgttcttgatacagctcaaggacaaaatggtgagaattcaatttccttagttacacaaatgagatatagtccagactatgtaaaaaaatggacacaatcacaaactggaatatttgatttatatgaaaatgctcaacctgattatttgccactaaataagaagatgccatcacgagttgttgttgaaaaatatagagcaattcttgctgtgagaaagaagtatcagcatatcgtaaatagagatggtagtttgacgttacgctggagagctaagaagcaaaaaaaggtaactttaccactagtgatgtacaagcaatctagattgattgtaaatggaaaaaagaaaaacaagattaatcaaaatgatattggagcaccaattatagtccagaaaaagggcgaaaatacggttaatttgaaattcatggtcccactttggtttaatattcttttggcaataaatattttgggatggatagtattaattggatattatgcaaggaagaagtatttaatagccaagaaataataaaaagctggaaataatgtctttatagcattacttccagcttttttatttcatatcgtattgtgattttcctgaaaccttaccatcagtaaaagtaatattaaagtttgcaccaacgctccctttaatgcctgaagtataatcccatacttcagatttgtaatttgctaagtcagtaatagtgtaaccattaggttctccaaatttcttttttatatcttcttgagattgtccatcggagattgcttcaaaatcgcttaaggctattttcttagagcggttaacttttaagccactgatacttttaactacagcatggtcgttgtcgaaattaactgtgatatttgatgcaaagctgccattatttacactatcccaagttaataattcagttttgacattttcaacagtagaagaactagttgatgattcctttttaccaaataattttctgatagcagctttactgtcaccatttgatgatgataagttaattttattaaagttagccaaagaaactttattactgctatttgaactgcttgatgaagaattagtagttgatgagttattggaatttgaatttcctttaccaattgtagagctggcgccacctactaaaacaattattactatccaaaaccaaattcttttataaattggctttttattatctttttctttcttcataaaaagacctcctaatatttaaaatcaactattttgactatagcaaggagtcttataggcaacaagcaacttatagttgcagccacgtaacttataagtgcatttttgatattatttcctgggcaataaaaaagccctaacaaatgttagagctaatatgcctcaaacaggagtcgaacctgcactctgttgccagaacagcgacctgaacgctgcgcgtctgcctattccgccattgaggcattcaattacgttatttatcataccaaatttttgctaaaatgtaagtagttataaaagttatgaggcaaattatgatagaaatttctgataaggtagttaaatcaataattgtcgaaagaccaagtgattcatataaaggaatgtttggccgagtcttgttaattggtgggagtttgaattttggtggggcaatcattatggcaacagaagctgcagttaattctggtgcaggtttgactagtgtagctactaatataaataatttgagttcgctacatagtcgaattccagaagcgatgtttatagattggcaagaatccaatttagtaaaagtaatcaaaaattcaaatataattgcgattgggccagggcttggacttgatgagcacgcgcaaagtttattgcaactagtaaaacgcactgtaaaaaatactcaaacagttatcttagatgcaagtgcattagatttgctagcgcaagatcatacattaatgcccactaatgcggaaacgattatcatgactccacatcaaaaagaatgggaacgagttagtcagataaaaataccatttcaagaagacaaagataatttttcagttttgaaatcactatttccagataataatggtattttagttttaaaatctaaccataccaaaatttacgattgttttggaaatatttatcaaaaccctctaggtaaccctggaatggcaactggagggatgggagatacattaactggaatattggctggtttttgtgggcaattttctgctaagatagaaacgattgcaagtgctgtttatttgcattctttagcaggggatgagctatacaaggagcattatgtggttttgccaacccaacttagtgcaaaaatcccccaacttatgaagaaattttcattagaataagaggtaaaaaagtgaaacgattctttaaaactattatttgcttgttgagctttttattaattagttccttagctttaactggtgggactgtctttgcaagcactagtattaacaatgtaaatgcaaatgaggctaaattaaatgttaaggctgcaattaccattgatcaaaaaacgggtgaagttttatatgccaaaaatgcggcgaaagcgttaccgattgcatcaatgtctaaattaattacaatttatttgactttacaagctattaaaaatggaaagcttagttggaatcaaaagctgactcctactaagaacatagtaaaattaagtaataattcggattattccaatgttcctttacaagagaaacatcaatatactgttaaacaattatatgaagcatctttaattgagtcagctaatggtgcggtgatgatgttagcacaagccgtttacggaagtcaggaaaacgcggtaaatcaaatgagaacacttctaaaaaaatggcagattaatggtgctcagatttataccacttgtggtttaaaaaatggtgaagtaggttcagatgcttatcctggtgctggtaaaaatgttgaaaatgaagtcccagcagttggcgttgctaaaatagttgatcatttattgacagattatcctgaagtactttcaacttctaaattagctgaacttgattttaaagacggttcaactgtaacaaaaatgaagaattggaactggatgcttaagggattgtcacagtatgatagtgagtatcctttggatgggcttaagactggtactagtgaaaaggcaggagcttgctttgctggtactttaaaatacaagggtcgcagattgattacaattgttatgggggctaagcatgtagacggcactgatccaagccgttttgttcaaactaaaaagatgcttgactatgtatatagcaattaccaattatatatttataaaaaaggcacccaattagcaaatcttaagggggtcaaagttgctgatggtaatcaaaagatatctaatttagttgttaaaaaggattccggaatttggcaaaagacaagttctactggtaaattaaccttctctaagtcagaaattgaagcaccaattaagaagggacaactagcaggatattatctatttaccaataatccaagtatttattcaagtaaaggtactaagttagccgctacagttcgcgaaaatattgaccaagctaatatctttgttagaatttggcatcttttctttaagtaaaaaactagctaaaaaaataaaagcctgttataatggctcatgaacaaaatcaaaagtagtagccatgaaagctttaagcgagtttgtgttggtgggagacagatagtggaagtggtgaaggcgtgtttgattatcattaatgttaataaacaaagcggatgttatcatcaattagagtggtaccgcgggttaatactcgtctctttctagttttactagaaagagacttttttatttgtgaggtgtaaatatggactttaaacaaaaagtagtcgaattaatttcttctcaagttgaattacctaaggaaaaaatcaatagtttgattgaacgccctaaaaatccagaaatgggggactatgcttttccagcatttattcttgctaagactttgcacaagaatccagcagaaatcgcaaaagatatagtagctaatttagctgatgataattttgaaaagattcaagctgtgggtccttatgttaacttttctattaagaagtctgctttaatttcacagactttagaagaagttttagttaagaaaaataattatggtaaccaaaacctcggtagtggtaatgtggccattgatatgtctagtcctaacattgctaagccaatgtcaatgggtcaccttcgttcaactgtaattggtaattctattgctaaaattttaactaaagtgggatatactcctataaaaattaaccacctaggcgattatggaactcagtttggtaaattgatcactgcatataagttatggggcaatgaagaagatgtaaagaaagatccaattaatagtttgttccattactatgtaaagttccacgaagttgcagaagaaaagcctgaacttgaagatgaaggacgtgcatggtttaagaagcttgaaggtggagatcctgaagcagttaaactttggaattggttcagaaaggtttctttacaagaatttaaccggatttataagaagttgaatgtagaatttgattcataccatggtgaagctttttataatgacaagatggatgttattgttgatgaattgcgtcaaaaagaccttcttgttgaatcacgtggtgctcaagttgtagatttaggcccagataagaatccagcaatgattttgaaatctgatggaacaagtatttatactacccgtgatttaactgcagcagaatatcgtaaaaagcattatgactttgtacaagcactttatgttgtgggaaatgaacaatctgcttattttgaacaacttaaagaagtcttgaagaagatgggacacaattgggcagatgacattcaccatattccatttgggttaattacacaaggtggtaagaaactttcgactcgtaaagggaatgttgtatttttagacaaggtgttggaagatgctgttgaacttgctatgaagcaaattgaaactaagaatccaggcttaccaaataaagaacaagtggctaacgaagtagggattggtgccgttgtattccacgatttaaagaatgatcgattagacgccttcgacttcaatctagaagaagttgttcgtttcgaaggagaaacaggtccatatgtccaatatactaatgctcgtgctcaaagtattttgagaaaggctaaccaaattgtcacaattgatgaacttgatttaagtgatgaatgggcatttgcagtagctaaagatttagcagacttcccagctgttttagcaaaagcaagtgaaaaatatgaaccatcaattattgctaagtttgctttaaagcttgctaagcactttaacaaatattacgcaaatgtacgtattcttgatgaagatgatcaattagcagcacgtttagccttagttaaggcaacttcaattgttttaactgaaagtttgcatttattaggtgttgctgctccaaaagaaatgtaataaaaggggaatctccccttgttaaaattatcacttatgagttaaaataattagtgtaaatttctaggaggtatatcaatggcttattttgacaatggtaatgaaatttttaaagaagctcgtaagcaccactacgcagttggtgcctacaacactaacaacttggaatggactcgtgcagaattacgtgctgccgaagaaactagaactccattattaatccaagtttctactggtgctgctaagtacatgggtggctataagtttgttaaggacatggttgctgaccaaatggacgcaatgaacatctcagttccagttattttgaacttggaccacggtgactttgaatcagctaaggaatgtattaagcttggttactcatcagttatgtttgatggtcacgcacttccaactgaagaaaacttagctaagactaaggaaattatcaagttagcacacgaacgtggtatttctgttgaagctgaaattggtaagattggtgaaaaccaaggcggtggtgaattagcatcagttgaagacgctaaggcattcgttgctgcaggtgttgacaagcttgcttgtggtattggtaacattcacggtgtttacccagcagactggaagggccttaacttcgatcgtttaaaggaaatcgctgaagcagttcctgaaactccacttgtacttcacggtggttcaggtattcctcaagatcaaatcaagaaggctatccaacttggtattgctaagattaacatcaacactgaattccaattagcattccaagaagctactcgtgaatacatcatggctgaaaaggaccttgataaggatcacaagggttacgacccacgtaagcttttattaccaggtactgaagctattactgataagatgaaggaaatgatttcttggatgggtaccaagactattgatgatgaacttaaggatgcatcatttgaccgttcttcattaaacgaagaataatcttattattaccttatttaaaaagactatccgtttggatagtcttttttgtttggtaaagtaactgttaatttttcaaaagtaaaaggtttgatcaatgtcatctcatatgcgattaaagctaaaggctctccattaaaattaggattatatagcggatcgccaataattggtagattaatacttgctagatgaactctaatttgatgtgttctacctgtttctagtgttagcttcaataccatagtatttttacttaagtcacgtccaattacttcataatgagtaactgcttttagcccattatcagctataatccgttttcgttgatcagttggatcttgggcaattggtgaactaattgtacctttttgggcaatatcttttagtttaacagtcgcataataatttctttgcattgtcttagtggttaactggcgatttaaaattggaacaacagcaggatttttagcaaatagcaataaaccattggtaagcatatctaaacgatgaatgatataaggggtataacctaagtaagttgttacatcgttcattgcagtattagtttcgaataaattaggatgtgttttttgtttgctaggtttattaattacaagtatatttttgtcttcataaataatttggggcaaatgaccacttggcagtattgggtgttgctgattttcaacatgagtaagagaaattgaatagagatcattaggatatactagttcattaaagttacgatattgtccgttaatcaaaatatttttctcaatacgtaaaaaatgacgccattttctgggaattaaaagctttctaagcatgtcattaactgaaatcggcgatttatctggatatttattgataaaattataagttggcataatatttataaaaaatcttcagctttctggtttaatttggcgaatgtgctaaaatcaaactgattacctaaaaggagaatgtagatgagggaatactcacgaaataaaaaggcaaatccggtttggctttttatcaagaacattaatcatcgctttcaagtgattagatggttagttttagcacttttaaccgtgattttaatcacatcatcttattatacaattaaggttaaaacttccaatatagcaaatttaaaggcttctttagcaacaactacgcagatatatgatgctagcggacaaaaagcggggaatctgtattcacaaaaaggtacttttgttgagttagacaaaatatcgccttatatgcaagaagcagttatttcaactgaagatcggacattttatacaaatcctggctttagtattaaaggaatggcacgggcctttgtaagtttgcttattcaccacggtaatattgctggtgggggatcgactttaacacaacaattagctaaaaatgctatcttgacacagcaacaaactttttctcggaaacttgaagaactattttttgcaatagagattaatcacgtatattccaaaaaagatattttgacgatgtatcttaataatgcctactttggtaatggtgtttggggtgtacaagatgcatcacataaatattttggaaaagatgctagtgatttaacagtaggtgaagctgccactttagcagggatgttgagaaatccgtcatattacaacccgattgatcatatgactaatgctttatcacgaagaaatgtagttctgggcttaatggtccaaaataaaaaattatcagcttcttcttgtaaaattgctcaatcagagagcttaagtcttaaagataattatactcaggatgatggctataaatatccatatttctttgatgcagtagtagatgaggcaattagtaaatatggcttaactgaagaagatgttatgaataaggggcttaagatttatactactttgaatactgattatcagtctgccatgcaagactcatttgactcttcagctaatttcccagcttctgctagtgatggtaccaaggtgcaaggagctagcgtagctgttgatcctaaatctggagctgtaagagcaatcgttggtggtcgtggggaacacgtttttagaggatacaatcgtgcaactcaaatgaaaagacagccaggatcttcaataaaaccattagctgtgtatacaccagctttgcaaaatggatatcactatgactctgaattatctgataaattgcaaacatttggctctaataaatatgagccacataatgttgataatcaatattcaaattcaattccaatgtatcaagctattgcgcaaagtaaaaatgtagcagcggtttggcttttagataaaataggagttgccaaaggtgttcaggccatgcaaaattttggcattaaagtagctaaaagagatcagaatttagccttagctttgggaggattatcaactggagtttcacctcttcaaatggccaaggcgtatagtgcttttgctaataatggaaatctccctaataatgcttactttattactaaaattgaagatgcaagtggtaatgttattgctcaaaattctaatacaggtagtcatagaattatgagtcaaagtgttgcaaaagaaatgacatcgatgctattaggcgtctttactagtggaactgcccaatcagctcaaccatctggttatcaagtggcaggtaagactggttcaacagaagtgtcatgggcttatggaactaaagatcaatggattgttggatatacaccagatgttgtagttgcaacatgggttggttttgataaaacagaccaaaaccattatatgcaaggaatttcagaaactggtataaccagattatataaggctgaaatggagggcattttaccgtatactaagggtacagcctttagtgaaaagcctgctcaaagtatggctaattcgactggctctgattcagattggttgtctcaggctggacaaaatttacaaaatggcttgaatcaagcaggcaagaatattcaagcatggtacaataatataaaaggcctatttggtaaataaggagagaagtatgattaacatttatgatacagctaataagctagcatctgaatttcaagaaacagatcaatttgcaactttgaagaaagcaattgcaggtgtaaaggaaaatgaaactagtctagctctttaccgtgaaatggaagaatttcaaaagggaattttgcaaaagcaacaaaatggtcaagaaatgactgatgatgaaaaagcaaaatatcaagaactagatcaaaagattcaaaatgatccacatgttaagcaagtaattatggctgaacaaggtatttatatgttacttgatgatattcaaaaaacaattgctaagccgattactgatctttatgaagatattagcattcattctggtaaataaaaatgaagtttattcacttagcagatgcgcatttagatagtccatttcgtgggctatcttttttgccttataagacctatgaagaaataaaaaatgcggctgaaaaatcttttcagagaatttgtgatatagcattaaagcaagaggttgatttagtattaatagctggagatacttttgattcgaataagcctagtcctaagagtcagttgttttttgctaaccaaataaaaagattgactgatgctaaaatcgaagtagttatgatttttggtaaccatgattatatggatttgaatagtttatttgttaattcaagcccatattttcacttgctgggaaatgaacaaaaaatagaaaaattatctttaaaaactaaacaaggctttgaatataatgtggtaggattttcatataaaaataaccatataactgaaaatatggttaataattttcctactaaagatagtacttatacaatcggtatgatgcacgcaggcattaaaactactgaacaaagccaaaacatttatgcaccttttgaaatggctgaattaagaaatttaaattatgattattttgctttaggtcatattcatgttagagaaattttatctcaaaagcctttgattgtttatccaggtaatattcaagggcgccatattaatgaattaggggcaaagggatgctatcttggagtagttgatgaagaaagaaaagaaactaagatttcttttgaaaaaacggccccaattctttggcagaagctagacctcacattatcaaagcaggtctcaaagacagagctacaaaattggcttataagtgaattgaacaaggctaatacagaattaacattcttttatgttgtaattaatgaagctcaatatttaagtgaagcggaagttgaattaattacagacagtgatttttggaataatttaagtcaaaatttagcatattcaagtcaggtagtagatttacgcttaaaaagtaatttacaaataaaattaggtgcaaaggaacaaaaggcattttccgaagcaaaactagaaagtacaagtaagtctaattttgtaaaattagcccaagaactaatcaaaaaggatcaatatttagctgatttatgtcaaaatgatgattttcagcaagaaactgttgaaagagcattagtgattctagctcaaagcatgaagggaattgatgatgaaactaacgaaaattaagattatacattttggtaagttatctaatcttactttttccctcccaagtaaagagattgacgtcttttttggtgaaaatgaagccggaaaaagtaccacggttgcgtttattaagcaaatattatttggattttatttgagaagtaataaagctcccttttttgaagaatatgaaccattagcagccgttagtccaatgggtggaagcttattttttgaattaggtggcagtgaatttgagttagagagattatggactaagggtgataagagtaaaaaaggcaccttaactgtaaaaaaagatggtcatattgtacctgagagcttattttttgataatattcaaaatattgatggtagtttttatgctgacagttttatctttaatcaagatacactagctcaaataatgaaattgactgaaaatgacttagttgagcaaatttattatttaggtgctgcaaagtcaaccgagtttttaagtctgcgagataaatttgataaagaagcaggaactctttttaaaaaattagggaaaaagcctgaagttaatcaattgcttaataagaggactgatgaattagctgatttaagtcaaaagcaagtagaattttcagactataaagttttagaagatgacttaaataagcaacgcaccgaatatcttaaagttcaaagtgaatataaagaaaacaatgaaaagcttattgcagcaaaagatttagagcaaaaactggcttcatataaaaaatatcaagctctgaaaaaagagtttaaggaagttaacttttctgaaaaagattttgatttatgtcaaagtttagtagttgaaagaaaaaatttattagctagtttggaagaaagtaactctcaattaaagagtttacaagaaagtgattttgatcaaaaacaagctgaaaaactattattagagcgaagctcgtttgttgaatggaaaaatcaacttgaaaataaaaaatatgagcttgataagaaaaagaagcaacgtgaacagctagttgctttgtatcctttcttaaaaaaattagaacagcttgatgctaatgagttgcagcgtgcaactcaaaaaattagctcaaaaggcaattcgaataaatctcaatttatgccttggataattggtttagtagttatgggtgctttttcttggatgatatcccccatcttaactcttttattatttatacttgtaggatatttaggaattaaagaagcaaaaagaaaagcaagtattagagaagataaggcaaatttagccagttttgttaataaatatggctttgacccaaataagcagaactttaacttagtaattgaaaaattaaatcaactgaaagaaattgaacttgatattaataactttagaagtgatatagaaaatttacagtccaagttacaaaattatactgtgaatttaggtaggtacttacaacagtcgctttctttagaagatgtaaatgaagccttaaataacttagaacttactttaagacaacaaaacgtacttgtagctaataaggctagtttaattgcgaatatcgaaagtttaaaaaataaacttgaagtaattaataatcaaattaatgacttcttcttaaatgcaaaagttaaaacttgggatgaatacttaaagttgcgagaagcttactttattaaccaagaacaagaaaatcgtttaaatgctttgtctgaaaactttaaggaggatcaagaaaaactccatgaaattttacttgatgaaaataaatggcaacaagagattgcagatttaaaaaagcaaaatcatcagttagaagttgatttaaccaagttaaatcaaaatactgcagaaattaaggttaagatggaaaatttcgcaaattctgatgagattgaacgacaaaaacaagaaattgaaacaactaatactcagctgaatactgcaactagcaagtatttggcctatgttttggctagtcaaattattactagagcacttgatattgcttctggtgaaagacttccaaagatgttagttgctagtcaagaatatttcactttgctgactaatggtaattatcaggcaattaactttggaaaaactattaaggttacagaccgcaatagtaaaaagatagaaattaagtatttatctagagcaacgaaagagcagttatactttgccttaaaattgtcctttgcgaagcaaatccaagatgaaattaatttaccgattttaattgatgattcttttgttaattttgatcatggtcgaacagaaaatattatgaaattgctagagcaattatcacaagaaaatcaaattattatttttacagcaagaaaagccttagctgatgctttaactaaacatgtattaacttttgaaaggtaggggtgaataatgttaaaaaacttaatggactataatttaggtgaagaatttgatcaagtattattaatcaagcaagctcaattattccatactaaaaaaggaacaacatatttgatgtttgaactagcagataaatctggaagtatgcgggccaacttgtgggatgctaatgaagatgatttagccaagtatccaacaggaaatttagtggcagttaatggggtaattgatgaataccaaaatcggcctcaaattaaaatcttctcgattagacctgtaactgaatcagatggttatgacttatcaagttttgtaaagaaagcaccagaagcttcggcaagtatgaaagaagaaattaatgattatgtgtttaaaattctaaatccaacttggaaccgaatagttcgctatcttttagaaaaatggagtaataaattttatacctatcccgctgctaaaactaatcatcatgctactcaagctggcttagcatatcatacactttcaatgctgagggatgcagatgcaattagtaaaaattaccctcaagtaaatcaatcgttactttttgcaggatgtattctacatgatttaggtaaagttattgaatttactggcccagttgctactaggtatactatgactggaaatttattagggcatttagtaattggtgatgaagagattgtcttagctgcaaatgaattaaaaattgacatagagaatgaagatgtagttcttttacgtcatatggttatttcacatcatggtttacctgaatatggtgcagctaaaagaccagctttacttgaagcggaattattacatagaattgatgatttagatgcaagtatttatgaaattactaaggcattacaagaaacaaaaccaggggaattttctagtccaatttttgcacaagatggacgtaaattttatcgacctaaaaatagcgagttaggtaagattgataagttaaattagagtaaacaaaaaccacttcatttgaagtggtttttcttattaatatacttgttaactagttagaactagttgctgaattagttgtagctgtagttgacatgtatgatgatagaacgttgcttaagtccttatctttaattgaaatatcagacttcttcaaaacagttctgataacactttgcatagtagtggtgtcttgttccattgattggtaaatttgttcatcaatttccttcttgtggtcactaaacttaccttttgaagggtgcttaatcatcttgatgatttcatatccagattgagtcttaactggagtagtagtgtattcaccattcttaagcttgaaagcagcagtcttgaagtctgaatctaaagtagtatcagttgagtcaaatgcagtaagcttgccacccttatttttagtagctgaatcaattgaatacttctttgctaaagttgcaaagctagtaccactcttcaattgcttaataacatcttcagcagttgatttctttgatactaagatatgttgaactgtaacttttggttggtaactcttccaagccttttgttcttgcttagaagtaatcttcttaatatcctttaaagcagcaacagttaacaagttagtttcaatgtttttcttaaaacttgaagttgtgtaaccattttgctccaatgcggattcaaatgaagaaccatattgcttcttgtaagcattgtattctttatctacttgcttttgagtaacttttttaccatattgttgctttaaagcacggtaaataatcatgttagcaagggtacttttacctgcttgtgatgattttaattctttataatattcatcttgggtaattttaccacccttgtagctaactaaagttgcactacttgaacaagcagtagcagacaaagcaatacctgcaacagcgacaatagctgcagcttttttccaatatttattcatagaaataaatctccacatccttataaacattactgccttataatatagcatactttagtgaatcttgtttcaaaattattcaaattcacaaaaaagtcatagtttcttaaacactactttagctaaattttatgcctataattagtaattcttaaaataaaaccagctactataaaagtaactggcttaacgttctagtttctttcttttaaatcagcattcaaagaaattatttttgcatttaaatcagaaattttgtcttttaagtcatctgttttttcgttcataatattttgaaatttttcagtcttagattgtaatgatgaaagagtttcagtagcaataggagctttttggttaaagttatttaaactatcttgaaaggtagccaaattatctgaaaaagtagcactgtcatttatactaccatcaatataatctttaacatcatcttttaaacatctatctttatcgtctgttggtaaaaatgcagcagctatacctacacctgcacctaaaataaaacctaaactaaatgatttaaacatataatatccttctttctgtgattataattgttaaaattctttgcgaatttcactagcaatttcttcatatttttcaggagtatattgatcagcattatttctagtggccattttaaaaccatcgcctttatagcggggaatgaagtgaatatgcgagtgcattacaacctgatcggcactagctccattattagccgcaatattcattccgctaatcttaggattgaattttttgatggcattcgcaatcattgggatatactgcaaatatttagccgcatcttcttgactatagtcaaataaattaacaatatgtttcttgggtaccatgagagtatgtccgggatttacctgagaaatatcaagaaatgcataaacatcatcattttcgaaaatcttgtaacttggaatttctccttttataattttacagaataaacaattgtcatctaaatggctcattgttgcactcgctcctttaatctttagtttctttcattgttcatgttatcataattacgattgtagttaataaggaaaaagattatgacattaaaaattaaaaatttaagtggaggctaccatggcgtagccgtaattaaaaatttaaatttagaaataaagcctggcgaagccgtaggcttaattggcttaaatggtgcaggaaaatctaccactattaagcatattttagggttgttgaggcctcaaaaaggtttaattagcttaaacggacttgaattaacaaaaaatcccgataagtttaaacagcaattagcatatattccagaagttccggttttatatcctgaactcacattaaaagaacatattgatttaactatcttggcttatgaacttaattcagataaagcttggaaaaaagcagatgagcttttgaagattttccgacttgataataaattggattggttgccaattcatttctctaaagggatgaagcaaaaagttatgttggtttgcgcctttataactgatgcagaacttttagttattgatgaaccttttactgggcttgatccactatcggcagttagtttgactaagttaattaatgaagcaactcaagatgggaaaatggtcttaatgactagtcatgttttaagtgaagtacaaacaacaatttctaagtttgccgttttaaataatggatgtatcgaagttagtggctcattagatgaaattaagcgttattatggcttatcaagttctgattcttttgacaagatttatgaaattctttcaagagagcaggtgcaaaatggataatttagctaaaaggcgtcttgcagaaaatactaaaagaaatcttcgttatttacgtttggtatttaatgacttttttgttttggccttaattttcttatttggtggttttatgtattggtatgctcagagtttgccaaagattcctaataatctttggttttacaaaccaatacttgcaatggcttttactgttggcctaattccaggtgagttagttacactgattaaaaaagcagatttacaatttttatttgtaaaagattctgagatgactgtatatttacaaaatttgaaaaaatatagtttagtcttgccatatatcatattgacactattaattgggattgctttcccttttgcaggaataaaattaggtatgcaattttgggaatacctaattattgctgttttactttatttgttaaaagcaatatatttgcaactagaatatttatccttgtcttttcaatatcattactctaaagttttattttatttgattgcttttttaggtatttatgctagtttattagattttgcggcttcagtagcattgctaattgcccttattggttttactatttatatttttagccaaaagcttgaaagttttgactggacaaaagcatatgagaaagaacgtataaggcaaaacagagtttttattttctatagtatgtttacagatgtttctgagaaggcaattgtaattaagcgaagaaagtatttggatttttggcttaattttcaaaaagcaaagaatgctaatcagtttttgttacaaagaaacttacttcgaaatcctgactatatttcattacttgttagaatgactatatttgctatcttactatcatttatggtaacggatatgaatatggtgttaatattatcagctttagtagtctttttaacagcatatcaattattgccaataaaaagactatatcagcgccatattatgtatcatgttatgccaataaaaagagataatattcgagaagtaaaatcagtagttacttgggctttacttcttcaggttataatgattgtaatcttttggatagtaatttttaaaatatcagtattgttaaatgcagctattttgcttatttttatgctgttaatagctaatatatatttaccgcttaaattaaaaaagaaaaattaggagaactgaatatgagattaagaaataaaccatgggctgttaagttagttgatgaacatcctgaaagtgttttacaagatcctaatccagaagttaagattgattgggaaaatcgttttgcagatttttcacgtccattagaagtggaaattggatctggaaagggacaatttataactacattagctcagcaacatcctgatagaaattatgtagcaattgagttacaaactacagctgcaggaattattttgcggacaaaattagaaaagaagttggataatttgcaaattcttcgaggggatgcgattagtattgctagcttctttgctgaaaatagtgttgatgtattatatttaaactttagtgatccatggcctaaaacacgtcacgaaaagcgtagattaacatataaggactttttgaaaaattatcagacaattttaaagccaacaggtcatttggagtttaagactgataatagtggtttatttagttatagcttaatgagtttgaataacttcgggatggtgtttgattttgttagtgtagatctacatcatgaaaatgaagaaattgttaccaaaaatgtggaaacagaatatgaacataaatttgcttcgaagggaaatcctatttatgcattacatgctcattttaaataatttacttttatgaatttttgatatatcatacttataaaaagtaagcacgaggaggtacactatgaaaaaaatagatgcactaactaaagaaaaattaattgaattaactaaaaatggccgaactgttttagagttttctgctgattggtgcccagattgtcgcttcttagacccatttatgccagaaattgaaaaggattttgctgatagtgagttttaccagattaatagggataactctattgaagtagctaaagatttggcaattttaggaattcctagctttgttgtctaccaagatggccaagaaattggtagactagttaataaggatcgcaaaactaaagatgaagtcgagagttttttgcgttcacttgattaacagaagtgaggattatcaatgattgcaagtacaaataaacatgcatatccaaatactttaattgttattttgggtcaagataagggtagaagtcactacgaagaaaaagatcaagttacaagagttttagacgaagataacaatgttatcggttttaacttttttgatgttgatcaatatctaaattatgatgcattagctaatggtgaagtcgaattaactgctgaggatcttactaagcttaaccaaattcttaaagataacggctttgctgatcaattagttccttcaaagccaactttagtgtacggttatgtaaaaacatgtgaagcacatcctgattctgatcacttgcatgtaacaacagttgatgtgggttcagaaagtgatgtaaagattgtttgtggtgctccaaatattgaagcaggccagaaagttgttgttgcattgcctggaacattaatgcctaatggtgcccagatttggccaggcgaattacgtggtgtaccatcatatggtatgatttgttcagcgcgtgaattaggtttacctcatgccccacaaaaaagaggaattatggtagtccctgatagttttgaagttggacaaaaatttgaaccaacaaaatgtgatgagttattagctagtggtgctattacattataaaaatagaaaaaagcgaagaaactgttattatatgcagctttttcgctttttttattttttttgaataaaaagcttgacaaaatttataaatctgataaattacattattattaattttaaattttattttttgaaatttaaaattaaatgtctagcatgaagtgattttttgatatgtggaaggtggatgaatctaaaacatctagaagaagttttgtacaaaaatttaagtacagaaagaataaagaattttcaagtaaaaactttatgtgaggtagcaaaagtctcacgaggtagcttttattatcattttaaaggaattgaagatttttacgaggcaatttttataaaagatttgaacaggattttgctttcaaatcgatatgataatttttccagtcgaatgctacaattactaaaagctttaaaagatgaccaaactttttatattaatttggttcatttgggcaatacaaaggcttttggtaaaaatgtggaaaaagctttgtttgaaattttaagatattatgcacgaagtcgaggatgctattcagaaccaacactgattagaatatcgaaagcaatgtatcatacgatctactattggataatgcatgattgcgaagatcagatccaccaaattcatacttgtctttttttacaatttcaagaattagatcgacaaaaagaattgcatgatattattggaatataagaataaagaaagaggacacagattctgtgtccttttttcttaaaaagtattgccaaaagccaaaaaatagtgtaaattaattaagtcatcgcgattattgtgatcggatacagattcttttgaaaaaagcaaaaaaacacttgccaaaaagaaaataatcctgtatcttagataaagtcgtgttaaggcaaagccttgatgacaaaaatatttcaaaaaagaataaaaaagttcttgcaattttgaaataaatcaagtaatataattacttgtcgcgagtcgatgagacagcgaaaaaataaattcaaaaaagttcttgaccgaaaggttaagagatggtaatatattaaattgtcgtgagtcagagatgacgagcgaggataaataaattaccaagtatcagaaaaaagttcttgacaaaagcaacttgcttctgatataataacaaaggccacttgagtggccggagttagtactttgaaaactgaacaaagtttcgctaaagtgtgcgggtgtaacaacccaaacaaaagcgaagtcaattcgttaagcaataaatttgagataacaaatcaaaaaactgattgagctaagagctcattttaattcaaaatgagagtttgatcctggctcaggacgaacgctggcggcgtgcctaatacatgcaagtcgagcgagcttgcctatagaaattcttcggaatggacatagatacaagctagcggcggatgggtgagtaacgcgtgggtaacctgcccttaagtctgggataccatttggaaacagatgctaataccggataaaagctactttcgcatgaaagaagtttaaaaggcggcgtaagctgtcgctaaaggatggacctgcgatgcattagctagttggtaaggtaacggcttaccaaggcgatgatgcatagccgagttgagagactgatcggccacattgggactgagacacggcccaaactcctacgggaggcagcagtagggaatcttccacaatggacgaaagtctgatggagcaacgccgcgtgagtgaagaaggttttcggatcgtaaagctctgttgttggtgaagaaggatagaggtagtaactggcctttatttgacggtaatcaaccagaaagtcacggctaactacgtgccagcagccgcggtaatacgtaggtggcaagcgttgtccggatttattgggcgtaaagcgagcgcaggcggattgataagtctgatgtgaaagccttcggctcaaccgaagaactgcatcagaaactgtcaatcttgagtgcagaagaggagagtggaactccatgtgtagcggtggaatgcgtagatatatggaagaacaccagtggcgaaggcggctctctggtctgtaactgacgctgaggctcgaaagcatgggtagcgaacaggattagataccctggtagtccatgccgtaaacgatgagtgctaagtgttgggaggtttccgcctctcagtgctgcagctaacgcattaagcactccgcctggggagtacgaccgcaaggttgaaactcaaaggaattgacgggggcccgcacaagcggtggagcatgtggtttaattcgaagcaacgcgaagaaccttaccaggtcttgacatcctttgaccacctaagagattaggttttcccttcggggacaaagagacaggtggtgcatggctgtcgtcagctcgtgtcgtgagatgttgggttaagtcccgcaacgagcgcaacccttgttaatagttgccagcattaagttgggcactctattgagactgccggtgacaaaccggaggaaggtggggatgacgtcaagtcatcatgccccttatgacctgggctacacacgtgctacaatgggcagtacaacgagaagcgaacctgtgaaggcaagcgaatctcttaaagctgttctcagttcggactgtaggctgcaactcgcctacacgaagctggaatcgctagtaatcgcggatcagcacgccgcggtgaatacgttcccgggccttgtacacaccgcccgtcacaccatgagagtttgtaacacccaaagtcggtgaggtaacctttggagccagccgcctaaggtgggacagatgattagggtgaagtcgtaacaaggtagccgtaggagaacctgcggctggatcacctcctttctaaggaagcaaggtgctggagagtagagatactaaaagaaggcactgagtacggaagcacactaaagaaactttgtttagttttgagagtagtagctctcaaacattgcacgttgaaaactgaataacaaccaagaaaaaaccgagacaatcattgaacagattgtgaaagcgaaccgagaagagagatctaggtaataggtcaagaagagaagggcgcacggtgaatgcctgggcactagaagccgatgaaggacgtgacgaaccacgaaaggctacggagagctgtaagtaagctaagacccgtagatatccgaatgggggaacccggtgcagcgatgcatcattaaatactgttaaggtatttaaaggaagacgcagtgaactgaaacatctaagtagctgcaggaagagaaagaaaaatcgatttcctaagtagcggcgagcgaaagggaaagagcccaaaccattgaatttattcagtggggttgtaggactacgatgtgagacagagaggtatagttgaagtctttgggaaaagacgccagagagggtgagagccccgtaagcgaaatagctcgaagctctagtagtatcctgagtaggccgggacacgaggaatcccggttgaagcagcgaggaccatctcgcaaggctaaatactaactagtgaccgatagtgaaccagtaccgtgagggaaaggtgaaaagaaccccggaaggggagtgaaagagaacctgaaaccgtgtgcctacaagtagtcaaagcacattaaagtgtaatggcgtgccttttgtagaatgaaccggcgagttacgttaagtagcgaggttaagacagaaaagtcggagccgaagcgaaagcgagtctgaatagggcgagcagttacttgacgtagacccgaaaccaagtgacctacccatgtccaggttgaaggctaggtaaaactggctggaggaccgaacccacgtaagttaaaaattgcggggatgaggtgtgggtagcggtgaaattccaaacgaacttggagatagctggttctctccgaaatagctttagggctagcctcgcgagagaggataatggaggtagagcactgtttggactaggggcccgtcaggggttactgaatccagataaactccgaattccatatatctatacgcgggagtcagactgcgagtgataagatccgtagtcgaaagggaaacagcccagatcaccagttaaggtccccaaatctatgctaagtggaaaaggatgtggagttgcgtagacaactaggacgttggcttagaagcagccatcattcaaagagtgcgtaatagctcactagtcgagtggcgctgcgccgaaaatttaccggggctaagcatagtaccgaaactgtggatgtgcgtaagcacgtggtaggagagcgttctaattgcggcgaagcctaatcgagaggataggtggagcgattagaagtgagaatgccggtatgagtagcgaaagataggtgagaatcctatccgccgaaagactaaggtttcctggggcaggctcgtccgcccagggtaagtcgggacctaaggtaaggtcgagaggcgtagccgatggacaacaggttgagattcctgtactaatattaatcgttaagagcaatggagggacgcagtaggctaatggcgcatgtaactggaatcatgtgtaagcgtcaaggcttgaagtgagtcaaatgcttgcttctaaaaggctgaggcgtgatgcggagcgaaataaagtagcgaaggtcatgatgtcacactgccgagaaaagcttctagccagagagatattacccgtaccgcaaaccgacacaggtagtcgaggagagaatcctcaggtgagcgagagaactctcgttaaggaactcggcaaaatgaccccgtaacttcgggagaaggggtgctgatctccggatcagccgcagtgaataggtccaaacaactgtttatcaaaaacacaggtatctgcaaaatcgtaagatgacgtataggtgctgacacctgcccggtgctggaaggttaagaggagagcttagcgcaagcgaaggtttgaattgaagccccagtaaacggcggccgtaactataacggtcctaaggtagcgaaattccttgtcgggtaagttccgacctgcacgaaaggtgtaatgatttgggcactgtctcaacgagagactcggtgaaattataatacccgtgaagatgcgggttacccgcgacaggacggaaagaccccatggagctttactgtagcttgatattgagtatctgttaaacatgtacaggataggtaggagccagagaaagtaggacgctagtcttactggaggcgctgttgggatactacccttgtttgatggatgctctaacctaggccgctaagcgtggtcagggacagtgtcaggtgggcagtttgactggggcggtcgcctcctaaagtgtaacggaggcgcccaaaggttccctcagaatggttggaaatcattcgcagagtgtaaaggtataagggagcttgactgcgagacctacaagtcgagcagggacgaaagtcgggcttagtgatctggtggtaccgtatggaagggccatcactcaacggataaaagctaccctggggataacaggcttatctcccccaagagttcacatcgacggggaggtttggcacctcgatgtcggctcgtcgcatcctggggctgaagtcggtcccaagggttgggctgttcgcccattaaagcggcacgcgagctgggttcagaacgtcgtgagacagttcggtccctatccgtcgtgggcgtaggaaatttgagaggagctgtccttagtacgagaggaccgggatggacataccgctggtgtaccagttgttctgccaagggcatcgctgggtagctatgtatggacgggataagcgctgaaagcatctaagtgcgaagcccccctcgagatgagatttcctttgcgaaagcaataagacacctcagagactatgaggtagataggctgggagtagaagtagagtgatctatggagcggaccagtactaatcagtcgagaacttgaccaaagcgaaggttttttgttggttgaaattcagttttgagcgagtaagctcaaaagagagtgcggtggcgatagcaagaaggatacacctgtacccatgccgaacacagaagttaagcttcttcacgccgagagtagttggtgggaaactgcctgcgagggtaggtagccgccgcgcacatggaggattagctcagctgggagagcatctgccttacaagcaggaggtcacaggttcgagccctgtatcctccatatcctgagttgttagctcagttggtagagcaacggacttttaatccgtgggtcgagggttcaagtccctcacagctcattggccctaatatcgcgggtgtggcggaattggcagacgcgctagatttaggttctagtgttttcggacgtgtgggttcaagtcccaccacccgtattggtttgctaaaccacacattgacaatatgccgatttagctcagttggtagagcatctgtcttgtaaacagggggtcgtacgttcaaatcgtataatcggcattcatatttttgcggaagtagttcagtggtagaacatcaccttgccatggtgggggtcgcgggttcgaatcccgtcttccgctttcaataatgatgccggggtggcggaattggcagacgcacgggacttaaaatcccgcggttggtttcaaccgtaccggttcgactccggtcctcggcacttattgatgcacccttagcgcaactggatagagtgtctgactacgaatcagaaggttgtaggttcgagtcctacagggtgcataatcgggaagtggctcagtttggtagagcacctggtttgggaccagggggtcgcaggttcgaatcctgtcttcccgatagtaattaaattcttaatttgattacattttggcggtgtagctcagctggctagagcgtccggttcatacccgggaggtcgagggttcgatcccccccgccgctattgtacgcttggacctttagctcagttggttagagcagacggctcataaccgtcttgtcgtaggttcgagtcctacaaggtccataaagggtcttaaaaaattaaatataatgtattatcgcgggatggagcagtctggtagctcgtcgggctcataacccgaaggtcgttggttcaaatccggctcccgcaatatggtccattggagtagtggtttatctcgcctccctgtcacggaggagatcgtcggttcaaatccgtcatggaccgtaagaatggctcggtagctcagttggtagagcaaaggattgaagctccttgtgtcggcggttcgattccgtcccgcgccattatttttttaagattttgtgcgggtatagtttagtggtaaaacaaaagccttccaagctttagtcgcgagtccgattctcgttacccgcttatatgggcctatagctcagctggttagagcgcacgcctgataagcgtgaggtcgatggttcaagtccatttaggcccatatggagcaatactcaagtggctgaagaggcgcccctgctaagggtgtaggtcggataattccggcgcgagggttcaaatctctcttgctccgttttagttttaaagcatgttatcgtaacagataacatgctttttgttagctaatatagatttaaaaaaagggctctttgtcaaatcctgttgataaagagtgatttaaagaatcaagcaatatataaattgcttggttctttttctttaactttgttttcttctaatctaattcttgttagtaagttaatgtaatttgagtatccataagcagtacgctcaatctgtttaatcttacgattgaaaccttctaaacaaccattagagtagctgaatctagcaccatttaagactgctcgtaagttatgcttaaaggtcaataaagtcttgtgcatcaaagtgccaaccttagctttagaattaattatttctttcaaagaattagtatctctagctttaagagcagccataaagtcttgcattaaattatacgcattatctagtcttggatcacaactaataccttccattacaacttgttcttgagttagatagtctttgaagtgccaattataatgagggtgaatcttatctaaatcaacgaaagacttaagataaagcttccaaggtgatttgagcagttgatattgccttgctcgtttatcaaaagacttcatgactaaaactcttaaagaattaaaagagcgagttaacatctgtaccatatgaaaacgatcaatgataatttctgcattagggaaacaagctctaacaatattttgatagtaaaagtttaagtccatagaaacagttttgacgttagcacgagcactaggagagaatttaccaaagtatttaagtaaagactttttgtatcggtttctgaggatttgaaccacttcatgcttttgaccatcaagacaaataaagtgtagctttttatcgacgcctttaaattcatcaaaggctaagtgttcaggtaaatagttatagttatcaataaaacgatgagaacaagaagctaaaatgcgttgaacagtattaacagatagattattctcacgagcaatactagtcatagaacggtcctcagttaaagcagaaagaggcaggattagagatagaacaatatttattaactaacttagatttggccattgaacgagtattacaatctcggcagagaactctttgcttatttaacctgatgatcacaggactactagcattagaagtaataaatctaatattagtctgaagatgaccattatgaatcagattaacagaaccgcaaaaaggacaagcaggctgaataagagtagcttgaaagaccttatacttaataccgttaattaatttaaagaaatgagcattaaaagtgatattagggtcttggatatcgagcgaaaatttaatacaatcattgtaagaggacatagaaaaaccttcaatctattaaaatttgagtcgtgttgaattttattgtaagtagaggggctatggcctcttttttgcaataaaaaacctgttaacagtttaactcaaataaactatcaacaggaaaaattatagaaccaaaaaggcacgcttcaaaagcgtgccttttttagttggtgagttgccaaaatggatatgtttgtgtatctatacgtaaatttacttctgcttttgcaaattcttctccatctaagtgtataaattggctatttttcgttttaattgccaattttttattcttaattcgatgaacatatggacttttatctattttgcctagtataaaaagtctaagtatttttaataagcttggtatattctttttttcgacaacaaatagttcaagtccatttttgaaagggctcatttctggtgagacttttattccacctccaatatagggtacgttgttaacgattgatatataagctctcttaaaatgtttgtctccgattatcagttcaaacgtattttgggttaaaaatgctgaaaaacctttcaatgcatatgaaaattgccccaaatttagtttgtttaagcccattttagttaatgatgaatttgtcttatgaactatgcgggcgtcaaatccaatccctaaattgttaataaaatatccttcacgaccacctatttgttcaatgtaatgacccacacaaatattctttgtgttcttgcaattgataatctgttctagtgcctctagtggcaaattcgaaataccgtaggattttgcaaaatcatttcctgaaccagttggaatgtaagaaactggaataggatttttttgttttgcaaataataagccattaattacttcatgtaatgttccatctcctccaagaactaaaacaaggtcacactcatgtttataagcgatttctttggctaattcttgggcatggccgatggctttagtataaaagcaatcatagacaaaactttttctttttaattctctttcaattatcggccagattttttttgcatgacctgaaccagctttgagattaacaataattgaaaattttggattcttatttttcatataaacctctaaaacaatacatattacatgatatatagactagcatagccaataagaaaagtcattaaaatccttatttactatatatatacatttgacaagattaaatagtaatatataatttgtttttgttagctctacaaatctctaaatatatagttttagagattaaaaaagcaacatttaggtggttttaatggaaaaagtaagcaaatggcttaaaagtaagagctttttaaaactgattatgatctctgtagcagttttagctccaattttttatagcttatcatttataaaatctgtttggaatccatacgcaggagccaagaatttacctattgcagtcgttaataaagataaagctgtcaaatataaccgaaagactctagctgtcggaaatcaaacagttgcccaacttaagaagaatcatgatttaaaatggatcttcgttagcgagaatgttgcaaaaaaaggattaaaaaatcgagaattttacacggtagtgacaattcctagtgatttttctaaaaacgcagctactgttatgagtaaacaacctaaacaaatgcatttgaaatataagacaaatgattcattaaattatttggctgaaaccatgagtgaggtaggtattaaacagcttaatactatgatccgctcagctgttaccaaagcatatgcaacagctatgttttcacagttaaaaactttaggggctggaatgaataaagcagcatctggagcgcaacaaatcagtgatggaacagtagttttagcaaatggtactaagcaatatactgcagcagtatcacaaattaataatggggtacaaacgctaaaagtttctgttgcaccacttaaatctggtgccagtcaattagcttcaggctcagccgctcttgctaacggtatttcacaatatacagcaggagtggacaagttaaatagtggtgttaataccttaaatggtaaatctagcgatttattgactggtatgaatacatttaattcaggcttaagccaatatacggctggtaataccaaattaaatactggtcttaatactttgagttctaactcagcagctttaagaatgggagtagcgagcttaaaatcagcaagtaatcaatttggcttattgaataacggtgctagtcaagttgctactggtgtgcaaacttttaatagcaagctgcaatctagtaatattgttggttctcttacccaagcactcagtatgcaagaacaagttgctagtcttgaaaaacaactgacaacagtacaaagtttgctaaagcaactgtcgagtattgatgtcaattcattaactacagcagtggataagttgcaaaatcaggcttttaccactgcagcagatatggggaatttatatacatcacttgatgataatcaaaaaatcagtgatgatgccgatcaaataaattcgctattgaataacgacaaaagtttaagcagtgacactaaggctaaattagcaaatttagcaactgaaattaagacaaaagccactgattcaactaatcaaataaattcagctaacgattcgtggggcaatttattaggagtaatgttggatactcaaagtactttgcaaccacaacttgatactgtacaaaatctttcccaaaaattacctgcattgcaatcaactatgactcaagcacaaagtcttttaactcagactgataccttattatcagcattgaagaaaaatcaagacttattaacagcgatgccaacacaacttgcaagtttacaatcagtaacaggccaaattgcagtaggtacacaaaaattggctaattcaacaggttcaattaatactttagtgaatggtattaatcaatatactagtggtgttgacactgcagcaaacggtgcagctcaattagcttctaagtctgatcgtttaatttcaggttttaaattactctatgatggaactaatcagtatactcaaggggtaagtcaagtaaaggcaggtactaataccttagtatctaataatgcttccttaaatagcggtgcaagtcagttgagtacagcactttcatcattgaatttacaagttccaagtctaatcgatggagtaaatcaattagcaacaggaactcaaattttaaatggtaagtctgacaagttgcttaatggtatgactcagctttcatcaggaagtaataaattggcaacacaattaaatagtggagcaaataaagttaatagtaatattggtactccaaataatgcccaaatgtttgcaagtccaacatcattacaacatacttctacaagtactgttcccaactatgggcatgctcttgcaccatttgcaatggctacaggactctttatcggagtattaatctttactttagagttcccagctaatagaagacataagacacctagggatgcagttaaagtcttaaacgaagaatttaagcgggcagtaagtgtgagtttagctatggtcgtaattttaaatatgattatgattttatcaggcttgaaagtagatcatatttttgacttgttctgggtttgtttaatatatacacttgctcaaatggcaataatgcaattcttaacgctaattatgggaagattaggtacaataattggattattactatttgttgcctccattggtggagcaggtggtatgttcccaatgcaagtaactaattcattctttaatgctattcatccatttttaccaatgtcttatgcaataaatggtttgagacaagcaataacaggaggattgggcaatagttatgcaagtattaacgcacttgtcttattaggagtagcagtattgttttacttactcttcttattggcagcaagtactttaataaaaagagatgttttagtaacagatactaaagaaattacacaagaaatttaagaaaattcataaaaagtaagcaaatttggccagaaagaggctaaatttgctttttttaatcgctgtaaacactgaaataccagcacttcttgaaaaaaatgaatttttttgaatttttttgcaataaagtgttgacgaaagcccctttcttaggtaatataatatttgtgctttggcggaggacgtcagagcgagtcaaaaggcccgttggtcaagtggttaagacaccgccctttcacggcggtaacatgagttcaaatctcgtacgggtcatgaccaaataattaaatattatatttggtaaataaacggaggattacccaagtccggctgaagggaacggtcttgaaaaccgtcaggcgggttctgcccgcgcgtgggttcgaatcccacatcctccttaatttatcgcgggatggagcagtctggtagctcgtcgggctcataacccgaaggtcgttggttcaaatccagctcccgcaatatggtccattggagtagtggtttatctcgcctccctgtcacggaggagatcgtcggttcaaatccgtcatggaccgtaaatggctcggtagctcagttggtagagcaaaggattgaagctccttgtgtcggcggttcgattccgtcccgcgccatgttttcttggaggagtagcgaagtggctaaacgcggcggtctgtaaaaccgctctccctgagttcggtggttcgaatccactctcctccataatagggatatagtttaaaggtagaacaacggtctccaaaaccgttggtgtgggttcaattcctactatccctgttagtacttcacggcggaattggtgaaggggttaacacaccggtttgtggatccggcatgcatgggttcgaatcccatattccgccctagaaatgagatgctgaaaggcatcttatttcatacaattgaaaagctaatggcggtgtagccaagtggtaaggcagaggtctgcaaaaccttaatcgtcggttcgagtccgacctccgccttattaagctggtgttagcaagtactatggcggtgtggcggaattggcagacgcgtcagactcaaaatctggtgtcccttgggacgtatcggttcgaccccgatcaccgctattttttataaaagctcatggataaagccatgagctttttttcttgctcaaattgcaagctgtacaagttatctctataatagtaatcatggaggtttttttatgaacattgggttatatacggatacttactttccacaaattagtggtgttgctacctcaattcaaactcttaaaagagctttggaaaagcaaggtcacaatgttttcatttttacaactacagatccgcatgtgggcaaaggtgttgtagagccaaatgtatttcgcttttcaagtgttccttttatttcctttactgaccgaagaattgcttttagggggctttttgaggctactagagttgctaaagaagttcaacttgatgttgttcacacccaaaccgaattttctatgggacttattggaaaatatgttgcacatcagcttaatattccagcagttcatacttatcatacaatgtatgaagattacttacactatgtgctcaatgggaatttactacgcccagtgcatgttaagcaatttacaaaagcctatttgaagaatatggatggcgttattgcacctagtaaacgtgttgaaaaattgctagatcgttatggtgtgcagattcctataaaagtgataccaaccggagtcgatatcgaggcaatgaatggagaccaacgaagagacgttcgaccagaacttggcattgcacctgatgatttagttattttgactctaagtagaattgcagctgaaaaaaagatagatagaatccttgatttaatgcctgaattattgggacaattttctaatttaaaattagtaattgcaggtgacggaccagatgttgatttattaaaggatcaagtggaacgcttatcaattgaggattatgtgatttttactggtgatgttcctcatgaagatgtaggaaatttctatcgtatggctgatttattcgtttccgcaagtgatactgaaactcaagggttgacttatatagaggcattagcagccggaactaaaagtgttatttttgatacagattatacggaaaatgtttttgatgatgttgaatttgggcaagtattcaatagccaaagagaaatgaaagaagcaattatttcttatttaaagcagggtaaacaagctattaatccaactaaattaaagactaaattagaaaatatttcggcaactcattttggtaaagaggtagttgatttttataaagctgcaattgatgcctattcaaataaagaggtaaatgatgattagaattaacatgttttctcaagcagattcagttaaaggacaaggtgtgggcagcgcctatcaagaattaattaatctgatgagaacaagattagtagacgatttttatatgacgattaataagtatggccaaagtgatttgactcattaccatacgatcaatccaacttattttcttaatagtttttcgcctgcaagaggtagaaaaataggctatgtacattttttacctgaaaccttagaaggctctataaaactaccaacaccggccaagaatgccttttataattatgtaattaatttttataaacggatggatcaaatagtcgtagttaacccaatattcattgataagttagttgctcatggtcttgaccgtaataagattaaatatattcccaactttgtatcaaaagacgaattttatacgaaaactacagttgaaaaaaatgcttttcgtaatcaattaggaatacctttagacaagtttgtcatttttggtgatgggcaagttcaagagcgaaaaggtgtagacgattttgctaaattggctgaagctaatccagatatccaatttatatgggcaggtggcttttcatttggaaaaattaccgatggatatgagcattatcgtaatttagtagaaaatccgcctaagaacctaatctttactgggattgtaaaacgtgaagaactagttaattatctaaatattgctgatttatttttactaccttcatttgatgaattattcccaatgtctgttttagaagccttttcttgtggcacaccagtattacttagaaatttagatttatataaagcaattattgatggctattatatgtatggtactgattttggtactttagacgagaaaattagagaaatcaaagctaatccagagctgttgaaaaaatatgcttcattatccacaaaggctagtgaaaagtattctgaagaacatttggctgagatttggcgtaacttttatcttgagcaatatgagcttggggttaagctaggacaaattcatttatgagaaagaaatattttttaggttttatagctgttttagcaataagtgcatttgtactatattgggatttgaagcaaactaattttaaagccttactttcagcaagcaaaaatataaattatagttttattattttgatttttttagtaattttatgtacatatctttgtgaagctttgattctatttgttttagcaggtaggaagagatttagcgatttaattcatttttatcgtgttccattgattcaagccttatttaatgcaattacgccaatggccactggagggcaacctgcccagctaattgcactgaaacaaatgaaaatcgaattaggtccagctagttcacttttgctgatgaagtttataatttatcagttagtagtcttttgtgcctatgtatgggctttttttactggtcatcaattattaggagaaatggatcactttaatatagttattgttattagttttttaatccatttaagtacaattatctttttactttttggtatgtttgcaagaaagactttaaagcgtataggtgcacttctttttaaattaggtggatattttacatcttcaagaaagttaattaacctccaagagagttttgatcaacaggtcgatgaatattatcttgagagtcaaaaattatttcagcataaaaagagtttagtaatcagctttattttgacttgtattcaattaactttattttacagtgtgccatttttaaccataaaagccttaaacttgtctggaagttgggttgaattaatgcaccttaatattttagttgcactatttatggctgtcattccaatacctggtgcaagtggaggagcagagttaggatttcagactttattcaaattctttgtaaaaaatggtgctcagttagttttaggcatgttcatttggagatttgcaacatatttctttggaatgcttctaggagtaatagcttggctaattagacccaaaaagaatattaggggttaattttttgttaaaagcctaaagtagttaatattgaagtgtatttaagtagtattatcataagagttgataattaaagattgagaggaaaattggatgtctcgtgccaaaaaaattgccaattggctctttcataccaagttgggttatttctcagttgtcctaactttattttggattaaaacatatctaatctatataactaagtttagtttaggtgcgactggggcgatgcagaatttcttgctgctacttaatccaattcccgctggaatgttattactaggaattggactctttgttaaagggcgaaagtcgtattggattatttggattattgatttcattatgagtttttggctttttgccaatatcttatattatcgtgagttttcaaattttttgtcatttgcgataatgtcaacttccggctcaacatctgataatttaggaaagagtatagctggaattactaaagctactgatttcttagtatttttagatttggtaattattttagcgcttatattgtttaaagtgtttaaaattgatgttcgaccattaaaattaaaagttactagcttaattgagcttttagccctaagtttaatggctttgaatttatttatggcccaaaaagatcgttcaggtttattaactaggacttttgataataactatatcgttaagtacttggggatgaacgaatatgccttatatgatggggtgaaaactgctcaaaataatgctgagatggctaaagcaaatgcctctgatctaaaatcagttcaagcttatttacaaaaacatcaagtaacacctaatgctagttatacaggtgttgctaaaggtaaaaatgttttgattattcacttggaaagttttcaacaatttttgattgattataaatggaagggtaaagaagtaactcctaatttaaataagttatatcaccaaagtgataccttgagttttgataatttctttaaccaagttggtcaaggtaaaacttctgatgctgaattaatgttagagaattctttatatggactttcatctggttctgcaatgtctagttatggtacagcaaatacttttgaagcagctccagctattttaggacaagacggatatacaacagccgttatgcatgggggagaaggttcattttggaatcggaataatgcatataagcaatttggttatcaatatttcatgccattatcttattatgtaaataagaagagttattatattggttatggattaaaagataaaattttcttcagtcaatctattaaatatattgaacgtttaccacaaccattttatttgaagatgattacggtaactaaccactatccttatgaactagataagaagaatcaatcaatcagtaaaactgatacaggagattctacagttgatggctatgtacaaactgctcattatttagatcaagctattggtgagttaatgtcttatttaaagaagactggtctggaaaagaacacaatgattgttctgtatggtgaccactatggtatttcaggaaaccaccacaaggcaatggctcagttgctcgataagaaggggtataatgattttgataatttgcaacaacaacgtgttccgttaatgattcatatgccggggttaaaaggtggtatcaaccacacttatggtggtgaaattgatgttttaccaactattatgaacttactaggatataatgatacgaatactattcaatttggacatgatttattagctactaatcgtgagcaattagttgtccaacgtaatggtgattttgtaacgccgaagtatagtaaagttactggaacatattattatactaagactggaaaaaaggttaaaaatccttctaaaaaggtaaaagaagaattagcatcattatcaaatcaggtcacaactcaattatcactctctgatcgtgtgattcggggcaatttattacgtttctatcatccttcatggtttaaaccagtaaatgctaaagattataactatcagaaaaagattgccttgaagaacttatatgcagaagataaaaagaaaaaatctagtctatggtatcaaaatggtaaaaagactacccaaagtgactttacaactgatgcaccggagttaaaaaagagtagtaattaaaaaatataagtaaagagtctatttttaggctcttttttcttcaaaaaatgttatgatgaaaaagattaaattgaaaaatagtattggagtataaaaatgctagataaaacaaaacaatattggttcattggaattaaaggtacaggtatggcttcattagccttaattatgcacgatttaggttttaatgttgctggtagtgatattgacatggaaactttcacacaaaagccacttgaagataaaggaattgtgattaagagttttaatagagataatatcacccctgcacaagttatcgttaaaggaaatgcctttaaagaagaaaacccagaagttgcagctgctttagaaatgaaagtgccaatgcattcatatccagatacagttgaagaaattattcaacaatacacaagtattggtattagcggtgctcacggtaagacttcaactactgcacttttatcacatgttttaactgaagctgctccaacttcatatttaattggtgatggtgaaggtcgtggtgttaaagattcacgcttctttgtttatgaagcagatgaatatcgtcgtcactttttggcatatcacccagattatcaaattatgacaaatatcgactttgatcatccagattattttaaagatattaatgatacgcaaagtgcatttcaatctgcagctgatcaaactaaaaaggcactttttgtttggggcgatgatcctcgcttgcaaaaaattgaaacaaaaattcctaagtatacttatggcttcaaggatagtgacgattttcaagcttataacgttaagaagtcaactgatggaacaagttttagtgtaaaggctcatggcaaagaaattggtgaatttaagacccatttatttggtgaccataatatcatgaactctcttgccgtaattggagttgcattaactgaagaagttccaatggaagatattcaaaaaggattgttaacttacggtggggcaaaacgtcgttttagtgaaaaagactttggtgatattactgtaattgatgattatgctcaccacccaactgaaatgagagcaactattcaagctgctaagcaaaagttcccaaataaaaaattggtagttgtatttcaacctcatacctattcaagaactaaagagtttgccagtgaatttattgaaatattgcgtggagttgataaagcttatattaccccaatttttggctcagctcgtgaaaagagtggcgatatttcaagtgaagatttaacaagtcaaattcctggtagtgaagtaatagatattgctaatatcgcagatttaactaagaatcgtaattctgtagtggtatttatgggtgctggcgatattgaaaaatatgaagatgcctttgaaaagttaatttaagttgaaagctaagagccaaaaagctcttagcttttttactagcttgtaaactgttaaaataaatatttgtaataatagctgtctaataagaaggagaaaaataatggcaaataagaaattacttttgattgatggaaattctgttgcatttagggctttttatgctctttatcgacaacttgatcgtttccaaaatcctgaaggcttgcacactaatgccatttatgccttcaaaaatatgttggatgtaattttaaaacaagaaaatcctagccacgtattggtagcgtttgatgctggaaaagttacttttagaactaaattatattctgactataaaggtggtcgtcagaaaactcctggcgagttattagaacaaattccttatattaaagaaatgcttaaggatcttggaattaaatcttatgaacttgtaaattatgaagccgatgacattattggaacatattccaagatgggtgaggaagctggttatcaggttgccattgtttcaggagataaagaccttacgcaattagcaagtgattcaactaccgtttatgttacaaaatcaggtgtaagtgaactagaagcttttacacctgaacatatgaaagaagttaatggtgtaactccgacggaatttattgatatgaaggcattaatgggtgataattcagataattatcctggagttactaaagttggccctaaaaccgcttctaatttgattcagaaatatggttctgttgaaaatatttataagcatattgacgaaatgaaaaagtcgaaattaaaagagaatttaatcaatgacaaagataaggcttttttagccaaaacacttgcaaccattgatcgtacttcaccagttgaatttaagcttgatgaattgaagaagcaagaaaccaatgtagttgacttgcgcaagttctatgaacagatgaactttagacgttttttagcagagctcaataattctaatagtgaaattggcgaagtgagcgataaaaaagttgattatatagttttagatgaacaaaacttaaataagcttccaaatgttaaatctgaagttagtttttatttagggatgttcggtgaaaattatcatttggcagattttgttggttttagtttgaaaatgggtgataatgtctatgtttcaaatgacgtatcattattgactaagcagcctttgcaaactttactagaagatcaagcagttaataaaaatgtttttgatttaaaaagaacaattgttggcttacatcgattgggaataaaagctaataacatcaactatgatatgttgttagcctcatatttggtaaataatgagaataattcaaatgacttaggagagatttgtcaattatacaattattacgatttgcagccagatgtcgatatttatggaaaaggtaaaaaagctgcaataccggatgaagaaatcttttttaatcatttagctggaaaagttttagcaattgaagcattaaaaccaactttgctgaaaagattgactgagcatgagcaagatgatttatatgaaaccattgaaatgccagttgctaacgtattagctaaaatggaaatcacaggattaaaaactgatgctagtacattagtccaattaggaaatgattttggacagcgacttactgaacttgaagcggatatttatcttgaagctggagaaagatttaacattaactcacctaagcaattagggcaaatcttatttgaaaagctagagcttccaccaattaagaaaactaagacaggttattctacttcagttgaagtgttagaacagttaaaagatcaatcaccgattgttcaaaaagtattagattatcgacaaattgccaaaattcaatcaacttatgtcaaaggattgcttgatgtaattcaacccgatggacgagtacatactcgttaccaacaaactttaacagcaactggtcgactatcatcagttgatccaaatttacaaaatatccccgttcgtttagaagagggaaaaaagattcgtaaagcatttattccttcaaataaagatggatatatcttttcttgtgactactcacaagttgagttgcgagttctagcccatgtttcaggtgatgaaaatatgcaagaagcctttaagactggctatgacatccacgctcatactgcaatgaagattttccacttagattctccagatgaagtaacaccaaatatgcgtagacatgccaaggctgttaactttggaattgtctatggtattagtgattacggcttatctaaaaacttagggattagccgtaagcaagctaaagaatttattgacaattattttgaacaatatcctaaaattaaagattacatggataaggaaattaattttgcccgtgaaaaaggttacgttgaaaccattatgcatcgtcgacgttatttgccagatattcatgctaaaaactttaatgttcgatcttttgcagaaagaaccgccattaactcaccaattcaaggtggggccgctgatattattaaaatagcaatgattaatatgcagaaaaaacttgatgaattgaatcttaaaagcaaaatgttgattcaagttcatgacgagttgatttttgatgttcctgctgatgaattagaaactataaagaaagttgtaccagaagtaatgcaaaacgcagttcatttagatgtaccacttgttgcagattctaattggggacatgactggtatgaagcaaagtaaaggagtagcaatatgcctgaaatgccagaagttgaaacagtacgtaaaacattaactgaattagttttaggtaagacaatagaaaaggcaaaggtgtggtatccgaatataatcataggggacagcgaatctttttgtaatcaattaaagaaaaagaaaattataaaaattgatcgttatgcaaaattcttactttttagactaagtgacaatataacgattgtttcccatttgcgaatggaaggtaagtaccgtttagcaactccacatgaagaaaaaaataaacatgatcatgtagaatttatttttactgatggaactagtttgcgctacaacgatgtaagaaaatttgggcgtatgcaacttgttgaaacaggaactgaaaagcaaaagacaggaataaagaagttaggaccggaggcattaagtgaaggctttactttaagttatttccaaagggcgttgaggaacaaaaagaagaatattaaagctgttttgctagatcaaaatgtagtttcaggtttgggaaatatttatgctgatgaaactttatggttaagtaaaattaatcctgagcgaccaggaaactcgctatcttgtgatgagataacgagcttatacaaagccattaatcaagttatttcccaggcaataaaagctcatggaacaactgtccactcatttttagatgcggaagggcaaacaggtggttatcaaaaatatctaaaagtgtatggcagggctggtaaaaaatgctttagatgtggcgcgactttacaaaaaaatcatattgctggtcgcggaacgactttttgccctaaatgccaagaggtgaagtaatgactttttatttagctataacaggtggtattgcctcaggaaaaacaacagctgataactattttaaagagctagggctgccagttattgatagtgatgaaatagctcataacctacttaaaagaaatacagaagttacgaaacaaatttgtcaactttttggtcaatcgtgtatccttcctagtggcgatgttaatagaaaggaactaggtcgacttgtctttaatgattcagaaaagttaaagctactaaatcagataacgcatccagccatttttgctgaaattaaaaggaaaaaagctgctattaaatctggaatctgtgtggttgatattcctttactttttgaaagcaaacagcagaaatattatgatgcaagtttgctgatatatgtgcctgaacaggttcaattagagcgtttaatgagacgagataatttagatagagaacatgctatggcaaaaattaagagtcagatgtcaacaaatatgaaattaaaattagccacctatagcgttgcgaatactggtacaatagaagtattacaagataagcttaataaaattttacaagaggtaaaggagaaagaagatgcaatgtccaaattgtcataaaaattcttctaaagttattgattcacggccaactgatgaaggaagaactattagacggcggagagaatgtgaaaattgtgggtatcgttttaccacttttgaacgcgttgaacaaacgcctctattagttataaagaatgatggaactcgtgaaccatttgatagggaaaagattttacgtggtgttgctgcagcagctcaaaaacgtccagttactagtgaacaattagatgaactagttgaccatgttgaaaatgaaatcagaaaacagggagttagcgaaatttcatctaaagaaattggtaaattggtgatgaacgaattggtaaatgttgatgacgttgcttatattcgttttgcaagtatttatcgtcagttccaagatatttctggtttcatgaagacaatgaaagatatcatggataaacatgaacactcaaattaaaaacgaagtgagataaatgtataaaaacgctgatcctagattaacgtattttgttttaaatagagttgatttagcaaaaaaacaagagcaagtgttgactcgtttataccagccgctaattggcccggttgcaatgtcattatatttaactttagttgatgactatcaacatgtaccaattaaaagccaaggaaaaagactgtatcaattacaagaaatattagatataaagttagaagatatttttaagagtttacataagctagaagcaactgggttagtcaaaacttttcatggtgaaatgctgagagtgggagattatttagcgtttcagctaattgatatacctgaagcaagtgagttttttaagactcttttgttaagcagcttattacttgaaaaagtaggaactacaagatttcaaagcttgaataaggaatttaatcctactttacctggatttatcaaagatggtagggatgtttcagctgacttttttgatgtttttcgtctatcagcagaaaaagctattaatcctgatgaacaagttttaaatgctgctaatttagcagatcaaaaagcagctgatttagtaaaagataaaatgagtccaattgactggaattttgtaaaagaactttttagtaaatatgggatttcagctaacgaagtagatagtcatgcagggcaaatggctcaattgatgcatttttatggcctttctgaacaagattttgttaatcaagttgcaacgactattattgcggggcaagaccaactaaatattaagcagatgcagtatcgcttaaatgaattagctactcaaaatcatagtcaaaaacaaatagctcaagcttttaaacgtggtaatgtacaaaataattcaccagttagtttaaatcaaagtgaacgggaattgttggagatggcccaaagcttaagtcccttgaagtttttagaaactttgaaatcacaaaagggtggttttgttacatataatgagcgtaatgttattcgccgtttgcaacttaattacaatttgcctgatgcatgggttaatattttgattaaaacatgcttagattatgattcagttttatctgacaatattactggacgtattgccaattcttggcttcagcaccaagtaactacacctgaagctgctcttaaatttacgcgtgagtggcagaagcgaaaagcaaataattttagtaaaaaaagagttgaaaagggaacgaactggaagaagaagattgctcaggataagattgataaaaaaggcggtacaagctccgctgatgatcaagatttgtctgaaataatgaaaaatttacagaagtttgatccaaaggattaggttatggaaaaaattaacgatttgctaggtaatgcttttactcagcataacaaagatagaaagattgatagcaaagctttgattaatgaagccttgcaagactcagaagtacaagcttttattaaacaaaatcaggtacctaaggaagttgtgctctcaagtttgaataatatctttcaatttcatcaacaaaaagaagctgccaaaactggctctaatcccatcccaggctatttacctaagcttattttgcatggttcgacgattgatttggcttatgctccaaccaaagaaaaaagtaaagaattggtaaggcaaaaagctagtcgacatttggaattaatagacattcccaaaagatatcgcaatgttacaagtaaagatattattgcaaatgaagatcgcaaagcagccattatagcaattaataattttttgatggaaattcaaggccatgaatataagcaaggactttacctccaaggtgacttcggtgtaggaaaaacttatttattagcttggcttgcaagagctttggctgagatggggaaaaaggttatctttttgcatacccctagctttttcgctaatttgagtactcatattaaagaacaaaatcttgatgaagaaatcaaccgaattagtcaggcagatattttgattcttgatgatattggcgctgaaagtttatctcagtggtcaagggatgatgtcttaggggttattttgcaatatcggatggataatcttttacctactttctttagctctaatttaagttttgatgatttggaaaagcattttgaagaaactcgtaataatattgagccagttaaggctaaacgcttgatgcaacgcattaagtttttaggcaaagaagtagatgttggtggtaaaaatcttcgtttagatgattagttgtagggatggagatatgattatgagacgttttatgcaggttcgcggtggtgctggcgatttaactaaagcagatgttaatgctagtccaaaggataatttatatttagctgttaattcaacatggcaaaaagatgctgtcattcctgaagaccgaactgaaattggggtaaacaccgaaattgatatgcgaattgaaaaacgcatgaaagatgatcttgaagctttgatagccggcaaagaagacgtaaatagtgtacctaatttagctaaagcagttactttttatcaagtggcgctaaatcttgataagagaaatgctgacaagactttgccaattcaaaaggatttacatgagttattggacttaaaaaatttctctgcttttaataccttagcttccaagaatttaacccagattctcaattcagcagtaatattgccatttgcctttgaagtcgatacagatatgaaagatactcaaaagcatgccttatactttgctggaccaggtacgttcttacctgatactacttcatacaagtcacctgatgccgaaaagttattagatattttagctgaacaaactgaaaaaatacttgaaatggccggtgtttcaaaagtagaagctaagaacttagtcaaagatggtttagcttttgatcaaaagctagcacaagttgtaaagtcaactgaagaatggtctgattatccagcttgctataacccattagctcttgatgaattcttaagtaagtttaagtcatttaccattaagacttatcttgaaaacttactagagaaattaccagaacgggttattgttatggaacctcgctatttagataaaattgaaaccttattcaatcctgataatttcactcaaattaagggttggatggtaatgaagtttattaataatagtgctagattcctttctcaggaaatgcgagaggcttctttctcattccatcaggcaattagtgggatggctgaattgccttcagttcaaagacaagcctactatttaactaatggcttctttgatgaagttttaggtgtcttttatggtcaaaagtatctaggtaaagcagctaaggctgatattactcagatgattaagcaaatgatcaaggtgtacgaagaccgaattcaaaataatacttggctttcacaagcaaccaaagacaaggcaattgttaagttaaatgccttagttttaaagatcggctatccagaaaaattagaaacaatttatgatgaattaacagttgatcctgaattaagtctttacgaaaatgaaaaggaatgcacccttattaaggctaaatatcaattagctaagttatttaagccagttaaccgcaatacttggctcatgccaggtaacatgaataacgcttgctatgacccgcaaagaaacgacataactttccctgccgggattttgcaggcaccattttatgacttaaagcaaagtcgctctgctaactatggcggaatcggggcgactattgcacatgaaatttcacacgcttttgacaacaatggtgctaaatttgacgaactaggcaatttaactaattggtggactaaacaagacttcgatgagtttgaaaagcggacgcaagctgcagtcgacttatatgatggcgttcaatatggtccaagtaaattaaatggtagacagattgttgctgaaaacattgcagacttaggtggtttaacttgtgcaattcaagcaaataaattggaaaatggtaacatgaaagagctatttgaaaattatgcttgttcatgggctcaacttcagcgtccagcagctattaagactgaagttagtgttgatgtgcatgcaccacagcctactagagttaatttaccagttcaatgtcagctagaattttatgaaacttatcaagtaagtcaaaatgacggcatgtggcttgatcctgataagcgagttaaaatttggtagcaagaatttaattaaaagacttgcatcatatttttgacggggtataattttatcttagataaaagacatgatgctatttgcctcagagagaggggcctagttctgaaagcccccattaaaatagcaccccaccttttttcttgaagatgttaataaacttggtttgatcccaatatcgatctatttgagagcgtatttttgtacgctaaatttgggtggaaccacgataatattcgtcccagcgtgagattttctcatgctggggctttttttgtttccggaggtttttagatgagtttttcaattactttaccagatggctcaaagaaagactttgatcaagccgtttcagtattagatttagccaagggtatttctacttctcttggtaaggctgctgtagctgcaaaagttgatggcgaagttaagtcagtaaacttcatgcttgaaaaagatagtgaagttgcaattttgactgataaagatgaagctggtttggcagttttacgtgatactgttgcctttttacttgaagcagcagctcaagctaagtacccagaacttcgcttaggtgaacatgaagcaaatgaagatggcttcttcgtagatactgacaaagaagaccaaatgaaggtaactgaattaccagaattagaaaaggcaattgctaagttaattaagaatggtcaagcaattgaaccagtaatggttaagaagagtgaacttgaagctcaatttaagaatgatccattcaagatggaacttcttaagagcgaaggcgatgaagttgctgccttcaagatgggtgactttgtcgactttggctttgctgcattattgccaaactcaggtaaggtaaagcacttcaagttattatcagtagctggtgcttactggcaagggaagagttctaacccaatgcttcaaagattattcggtactgctttctttaaggaagcagatcttgaagcagaccttaagcgtcgtgctgaaattaaggaacgtgaccacagaactatcggtcgtgatcttgacctcttctttgtagatcctaaggttggtgcaggtcttccttactggatgccaaagggtgcaactattcgtcgcgttattgaacgttacatcatcgataaagaattagctgatggttaccaacacgtatacactccagttttaatgaaccttgatgcttacaagacttcaggccactgggcacactaccgtgaagacatgttcccaccaatggatatgggtgatggcgaaatgcttgaattacgtcctatgaactgcccaagccacattcaagtttacaagcaccacattcgttcataccgtgaattaccaatcagaattgctgaacttggtatgatgcaccgttatgaaaaatcaggtgccctttcaggtcttcaacgtgtacgtgaaatgactttgaacgatggtcacacatttgtagccttagaacaagttcaagaagaatttgctaagattttgaagttaatcatggatgtatacaaggactttgacattactgattactacttcagattgtcataccgtgatccaaagaacactgacaagtactttgcaaatgacgaaatgtgggaaagaagtcaaaagatgcttaagggtgctatggatgacttaggccttgactacgttgaagcagaaggtgaggcagcattctacggtcctaagcttgatattcaaactaagactgccttgggtaacgatgaaactatgtcaactatccaacttgacttcatgcttccagaaagatttgacttgtcatacgttggtcaagatggcgaagaacaccgtcctgttatgattcaccgtggtattgttggtactatggaaagattcattgcttacttgactgaaatctacaagggtgctttcccaacttggcttgcaccagaacaagttgaaattatcccagttaacttagatgctcatggtgaatacgctaagaaggttcgtgatgaattacttaagcacggcttcagagcagaagttgactttagaaatgaaaagatgggttacaagattcgtgaatctcaaactcaaaaggtaccttacactttagtattaggtgacgatgaaatgaacagtaacgccgtaaacgttcgtccttacggtactgaaaagcaagaatcaatgagcttagatcaatttatcaatgaattacaagctgatgtagattcatattcaagagaaaagtaatcaatatttgaaattaatttagagcttgactggtatagctggataaagtataatgtttaactagttgagaacaagaagaagctcccgcttctcgcctaagttaaagataaaacctctaggctaatcgataatttctgttgattaaaggcgggttgttttatccatacccgcttttttcttgtcctcaaattaacatggaggtgaatcgttataccacggaatttaattttaaacgaaagcattcgcgcacgcgaagttcgtttgattggcgaagatggtgaacaagttggtgtcgtttctaaaaacgaggccttaaaccaagcagccgatgcagatttagatttagtacttatttctccaaatgccaagccaccagtagctcgcattatggactatggtaagtatcgcttcgaacaacaaaagaagcttaaggaatcacgtaagaagtcaaagactgttagtgttaaggaaattcgtttaagtccaactattgaaggtaacgacttcgacactaagttgaaccatgttcgaaagttcttaagcaaggaaggcgctaaggtacgcgtttctattcgctttagaggtcgagcaatcactcatactgaattaggacttgaagtattagagaagatggcagaagcaactaaggatattgctaatgttactgctaagcctaagatggaaggcagaagtatgttcttaatgcttgctcttaagagtgaaaaggataagaagtaaaaaaaacttgttaattggaggaaataaacatgcctaaacaaaaaacacaccgcgcttcagcaaagcgtttcaagagaactggtaatggtggtttaaagcgtcatcacgcatttactggtcaccgtttccacggtaagactaagaagcaacgtcgtcatttgagaaaagctgcaatggtttcacgcagtgacttaaagcgcatcaagcaaatgctttcccaaatgcgttaataacattttagaaatatagatagcgaattaggaggaatttcagatgccaagagttaaaggtggtactgttacacgtaaacgtcgtaagaaggttttaaagcttgccaagggttaccgtggttcaaagcacttgcaatttaaagcagcaagtactcaattatttgtttcatacaagtacgcattccgtgaccgtcgtaagcgtaagagcgaattcagaaagttatggattgctcgtattaatgcagcagctcgtcaaaacgacctttcatacagcaagttaatgcacggtttgaaggtagctggtgttgacatcaaccgtaagatgttagctgacattgcttacaacgacgaaaagacttttgctgaattagcagcaactgctaagaaggctttaaactaagatttagttcttagatgagaccaagattaaattcttggtctttttttgttgcttaatatgtgaagtgatgaactatttattttttgatggcagcgcttaccatattgaaagagctatggactgataattgtaactttatcgtgaaaaaataacaatgttaaataactatttacaacgctttctttgtggaattatactctaattgtaaaaagattcacatgctaaggaggatctattcatggtattagcaaaaaaatctgagtcacaaacaaataatgaagcttcagttcaatcgatgataaataaatatgtcaagagagctcatgagtctttagatataatggcaaactttgatcaagaaaaaattgataaaatttgtgaagcggtcgcaattgcgggagaacaaaataattacgccttagctaaaatcgccgttgaagaaactggacgtggcgttgtagaagataaggctataaaaaatatgttcgcaactgaaaacatttggaattcattgcgacatgaaaaaacagttggtgttattagtgaagataaagaaaaagaattaataaaaatagctgaaccagttggagtaattgcaggtgtaactccagttaccaatccaacgtcgactgtacttttcaaaagcttgattgccttgaaaactagaaacacaattatttttggatttcaccctcaagcgcaacgctgttgcgtaaaaactgcagaaattattcgtaaagcagcagttagtgcaggtgctccaaaaaattgtattcaatggattgaaaagccaagcattgaagctactggcgcattgatgaatcatccagaagtacaattaattttagcaacgggtggtccagcaatggtaaaagctgcttattcttcaggtaagcctgcaattggtgttggtccaggtaatggccctgcatatattgaagaaactgcagatattaaacgagcagtttatgatatagttttatctaaaacttttgataatggcatggtttgtgcctcagaaaatagtgttgttgttgatagtagtatttatgaacaagtaaagaaagaattcgcttcttggaaatgttacttcctcaagaaaaatgaaattaagccttttactgaaaaatttattgatccaaagcgtgggacagttgcaggtcctattgccggtaaaagcgcgtatgaaattgctaagctttgcggaattaacgttcctgaagatactaaggtcttgattgcagagtataaaggagtagggaaggattatcctttatcagcagaaaaactgtcaccagtatttaccctttataaagctaagaatcatgaagatgctttgcggatttgtacagaattattaaattatggtggccgtggtcatactgcaggtatccatacaaacaatcaagccttaattaaagagttctcaataaaaatgtccgcttgccgaattttggtaaacactccggctgccttaggtggtgttggtgatttgtataataatttattaccatctttgacattgggaacaggaacttatggggctaatgcactttcacataatgtatctgcaagtgatttgcttaatataaagacagtcgcaatgagacgcgataatatgcagtgggtcaaagttccgaaaaagacctactttgaacataatgcagctaattatttacgtcatatgccagatgttagtcgctttttcattgttaccgatcaaactgttgctaatgaatttggaaatagaattaccgatattcttgcaaatcgattaggagaaaaaagttatgagatttttcaagcggtaaatccagatcccgatagtgatgtgatttttgatggtgtccataggatgaaaatctttaaacctgatgtcataattgcgttaggtggtggtagtgttatggacgctgctaaagcgatgagactgttttatgaaaatccagatatgtcctttgaagatagctaccaaaaattcttagatattcgtaaacgtacagttcgcttccctaaagataacaaagtaaaattagtctgcattccaactacttctggttcaggttcagaagtttcaccatttgcaattattaaagatgcaaagacaggaattaagcatccactttgtgattattcattgaatccagatgtagcaatcgtggatgatcagtttgttcagaatttacctgaaaacttaatagctgctgctggatttgaagccttagctcatgctatagaatcatatgtttctacaatggctactgattttacccgtggctggtctatggaagcaattgatttgatttttgaaaatctcgaaaagtcttataagggtgatttggcagctcggaatcgtatgcataatgcagctactcttgcggggatggcttatggcaacgcattcttaggagtaggccattcaattgctcattgcttatcctcacattttaatttgccaagtggtgttagtgatattttggtaatgcctgccgtaattcgttttaatgcacaaagacctaataaattagctatgtggccacattatgctacttatcgagcagatagagattatgcaaaaattgcccaaagccttggaattaaaggaactaaaaatgatgaactaattgagggtttatgtcaaaaaatcagtgatttagcacatagcttagacattagtttgagtttaaaggattatggtattagtaagagtgagtttgaaaagcaactaggcgaaatagctgttgaagcatatggtgatcagaatactgtaactaatccttcagcaatgttgattagtgaaataaaagatttacttctaaaaatttatcaagcttaattgtagaaaataaagtcctattctcaattgttgaggagagggcttttttttcatataataaagagtacataaactaggagtagattaatgatttttagaccaatttatacgattgatacaatatatcatttagatcccactggattaagaagaatgggaattaaggctgttttttctgacttagataatactttacttgcatggaacattagagagagtagtcaagaaatggcaattttaaataagaaattagctaaagctggaattaaattgatagttatatcaaataataatccagaccgagtaagtgaagcagtaagtaagtttaatgtggcattttgggctaatgcaagaaagccgttgccattcggtattttaaaggcacttaagcattacaatttgtcaaaggaagacgttataatggtaggcgatcaattaattactgatattcaggccggaaatttggctggtgttaagacagttttagtaaagccacttgttgaaactgataaatggaatacaagaattaatcgcttttttgaaaaaattatctttttctttttaaatataaacaaaaaaattgagttcaaggagagcctaaaatggatgaagaattaagatgtattggctgtggagctattttacaaagtgaagatgaaaatgaagctggttttcttcctgcgagtgcattaaacaaggctcttgatggagaagataaagaaatctattgtaagcggtgttttagattacgccactatagtgaaattatgccagtagaattaaataataatgatttcttacgcttgttgaattcgctgggcgataaaaaggctttaattgttaatgtagttgatttatttgatttcaataattcgctaattccatcattaaaacgttttgttggaaataatgactttattttagttggtaataaagttgatctttttccacttaactctaaagaatccaagattaaagattggatgcgccaagaagctaacagaatgggactttatcctaaggatatttttctaattagtgcagctaagaagcgaaacttgcaagatttaattacttatttagatcaagcatcacaagatcaagatgtatactttgtaggtacaacaaatgttggtaagtcaactttaattaattcaattattgatttaatgggagatgtaaaagatttaattactacttctcgcttccctggaactacacttgatcaaattaagatcccacttgattctggtcattatttggttgatacaccaggaattatgactgaaaagcaacttgcatcatatttaaatgcaaaagatcttgatttaatcgctccaaaaaaacccctgaaaccagcaacttatcagttaaatagtggacaaacactttttttaggcggtttggggagaattgattttattagtggtaaaaaaactagcttcactgtttacactgcacgaggattatatgtgcatcgtacaaaaacaactaatgcggatgatttttatgaaaaacatgttggtgatttgctaactccaccacatggggatgaaaatttaccagcaatgaaaggtcaaacctatcatccaactactaaaagtgatttattatttggcggcattggttttattacagttcccgctggtgttgtcgttaagacatatttaccgggaggaattggtcaaggaattagacgtgcgttaatttaatagaggtataaaaatggactgtgttgtagcaaataagcctaaagttagggctcaagaaataaaaaaaatttcaggtaagcaaattggtattatgggtggaacctttaatccagttcatattgctcacttagttgcagcagaacaggtaatgaccaaattacatttagatgaagtttggtttattccagataatattccacctcataaagaattagctttaaatataccagctgaagaccgtgctaatatgcttgaacttgctacaaaaaataatcccaaatttaaggtaatgctccttgaattatatcgaggaggaatttcttatacgattgatacaatgcattatcttaagaaagaagcgccggaaaataattattatttaattatgggaagtgaccaggtaaattcattccatacatggaaagatgcagatgaattggcaagattagctactttagtagggattcggcgacctggatatacacaagaagcgcattatccactgatttgggttgatgctcctgatattcgtctatcttcaacagcaatccgtcatgctgtgaaaacaggtacttcaattagatacctagttcctgatagtgttcgggaatatattgaacaaagggggctatatcgtgaatgatttttatctaaataaaaccttttctgatttatctagtgatttattagtaaacaaggtacgtgctaatatggatgaggctcgttttcggcattgtcagggtgttagtattactgcaagaaaattagcaaagcttaataattatgatgaagataaagctgctttagctggctttattcatgattatgcgaagcaagtggctaatgatgaatttattcgtgttataaaagacccaaagaataatttcaatcaagatttactgaactggaatcgggcaatttggcacggaattgttggaacttatttcattaaacgtgatttaagtattacggattcagaaattttaactgcaataaaacgccatactactggggatgttgagatgacgacattggataaaattgtttttgttgctgattatattgagccaggacgtagcttttctggtgtagatgaagcaagagaagttactttttctaacttagatgcaggtgttggctatgaactagctcatacattacaatttttagcgaataatcgacaaaaaatatatcctaaaacattagctgcatataatgtttggggaattaaaaaggagaaataaatttgaatagcgaaaaattattagatattactttagatgcaataagcgaccgccacggtgaagctactgaagcatatgatatgcgtggaatcagtattttagcagatttttatattgtaactagcgctagctctaatcgacaattgcatgcattagttaatagtattttagataaggtaagagaatacgattatcatgattatcgtgttgaaggtactcgtgattctaattggcttttagtcgatttgggggatgtcgttgtaaatatctttactgaagatgctcgtgacttttatggacttgaaagcctttgggcaaatggtaaaaaattagatattcctgaggattagtaatgtcagttgttggaattattgcagaatataatccttttcattctggccatgaatttttaatgaatcaagctcgattaaaagctggcgaagatccaattatcgtaataatgtctggaaactatgttcaaagaggtgaaatggcaattacggataaatggactagagccaagtatgctttagctagtggtgctgatttaatttttcaaatgccttttgctaccagtgttcaagctgctgatatttttgcaaaaggtagtatggaaatcttgagtaagttaggctgtgaggaattagtttttggagtagaagatgccaacctaaattttgcttatttaggtgaaaaaattaaacaaattcctaaaaataaaatggactttaatgattatactcagacttattccactcaatataatcagatggttgctcgtgaagttggcaaagaagttaatgaaccaaatattattttggcattagcttatgcagttgctaacgcagatttatctagaaagttaaagttaagtccaatcactagaattggagctaatcatgatgacttgcttgagcgtgaacgagtggttcaaagtgcaagtgcaattagaaatttattacttgaacagcctaatttagccgatttaaagcagtgggttcctaaagctgaagctgagcagttattaacgcaaaagatttatcctaattggaatttattatttccatttttaaaatataggattgaatctgctagcttaactgatttacaacaaatttatcaaatgagtgaaggcttggaatacaagttaaaagctgaaattcatgaagctcgtgattttacagagtttttaaggcggataaaatctaaacgttatacatattctagattaagaagattatgcctatataccctattgggagttactaatactgatattatcaatagtcatgatgtttcaactatacttttaggttatagtaaacgaggaagaaactatttaaagcagatacgtaaagaagttgaattaccaattatttcaaaggttgaccataaaaatagtcaaaaaggtagtttagctcttgatgtaagagtagatcgcttatttgaacaaattattggccaagatcaaaattttggccaaaaaccaatggaggtgaaataatgttaacaattaatttttctcaaataaaaaagagtaaagaaccattaactgaaatttccacagaattagaaaccagacctgaattttttgaaagagctaaagaattattacttgatgccaataatattcaggttaaggggcaaatgttctatcaagaaccttttgtaacaggaaatttccaagtagaagcagacattgttgctccatcaagccgatcgttggcaccagttccaatgcatttgagcttctcttttactgaaaattacttagatcgagaaccaactaatgaagaaaaagaagaagttgacatgattgtcccaattgaaaaggatattatcgacttacaaaccgcagttgaagacaatttattattgagtttgccaacaactattcttactaaagatgaagaggaaaataatgaattccctcaaggaacaggttgggaagtagtttctgaagaaagtttagaagagcaaaatgatgaaaaaatcaaccctgcttttgctaaactaaaggatttattcccagaagacgataaaaattaaagccttttttaaggcttttttcttttggggcttgattattgtcaaagcttagtttttaatatattattgaattattaaaaagaaggataaatttattttatttttaaaatgaatatttcttcttagataacatcatttaaaattttaataaatagaaggtagagattagaaaaaatggctaagattttaattattgaagatgaaaagaatttagcccgttttgttcagttagaattacaacatgaagaatatgaaactgttgtagaaaacaatggacgccggggtttggatttagcattaaatgaaaaattcgatgcaattttgcttgatttaatgttaccagacttgaatggtctagagattgcccgtcgtgtgcgtcaagtaaaaacgactccaattatcatgatgacagctagagattcagttattgatcgtgtatctggtttagatcatggagcagatgactatatcgtaaagccttttgcaatcgaagaattattagctcgcttacgtgcagttttgcgtagagtaaatattgaaaagaaagtttcaagtaatactgctattaagcaaaaagttgttaaatttaatgatttaactattgaaactgcaaacagaattgtacatagaggggacaagacaattgatcttactaagcgtgaatataaccttcttatgactttgattgataataagaataatgttgtaagtcgcgaacaattgcttaacaagatttggggtcctgaatctaatattgaaactaatgttgttgaagtatatgttcgttacttaagaaataaaattgatgcacctgaccgtccttcatatatcaagacagtcagaggtacaggttacatggtaagagaagacgatgcgccagttccagaagcaaactaaaaagaaaaaggccaaaaatacgtcattagtcaagaaatgggtaagtcttgtggcattgactattacggtctcttttcttgttttttcagtaattatttattcaattgtcagtcaacagttcttaaatcaagaacgccaagttgctgaaactgtcgttgagaattttgaacatcgtttaaattcaattaataaagaattgcagatttcaaatgttgttccagctttatcgccaactactcagcgaattttaaatggtggaccgacaatttcagctgcggataataatactagttcgactgaaaatggctttagtgatgatattttacaaaatttaacgaatcaagatatcagtgtagtaatttttgataagtctggtgatattgtcttttctaatgggaaaaatcaagctgatttcgtaacagatataactcataaagaagaacaacttaagctttacctagggaaacaaagtttaactatttatcagccaattcgttcagcaagtagtcataaaattataggttatattgctgtaacagacgatatgtcaagctttaattcgatgatggaaaaagttagagcatggatgattggtatttcaatagtggcaacgataatctttattttaatctcttactttattattagaggaatcgtttggccactaaatgctatgtcaaaagttgctagacaaattaataaagatcctaatagtgatgtgagaattcctgatttaaagcgcgatgatgaattgggggaattggccaaaagctttgaccaaatgcttgatcgagttcagggctatattcagcaacaaaagcagtttgtgggggatgtttcacatgaattgcggacacctgttgctgtaatcgaagggcatctttccttacttgaacgttggggcaagaatgacccaaaaattttagatgaatcaatagatgccagtttacaggaagctgagcgaatgaagcatttgattcaagaaatgcttgatttaacacgggctgaacagattgatattcaatatcctaatgaagtaactaatgtttctgaagttttaactagagttgttagtgacttacagttagttcacaaggactttactttgcgcttaaatgatgacttaaatgaagatacaatgattcaaatgtatcatagtcattttgagcaattgctaattattttaattgataatgctatcaagtattcgactaatcgtaatgaggtcattattagttcaagtgttgaagatggtgaagccgttgttagcgtgcaagactttggcgaaggtatttctgaaagcgaaaagagtaagatctttaaccgcttttaccgggttgataaggctagaacacgtgaaaaaggtggtaatggtttagggctatcaattgcccaaaagttaacccaaagctatcatggccaaattagcgttgattcagtcttaggtagcggtagtaactttattctacgtttccctgttttaagcaaaaaagaagttaaacagctaaataagaaaaaagaaaaagctcaacggggcaaataattaaaacagctaggtttttgacctagctgtttttttatgacaaatgtcatcttttatcatgatgaaacttactacaggataatttttttctccgataaactagagatagttaaaggaggaagaattaatgacatacgcaattgaagtaaataatgtatctaaatcatttaataaaaagcccgttttaagtaatattaatttcaaaattgaagccggagaaattgtagctttacttggaaaaaatggtgcaggaaaaaccactttgattagactccttaatgatttaattactaaagattctggaactgttaaaatctttgaacaagttaagcctgaccgcaatctgattggggtcatgtcacaaaattcagttagattagacagagtaaaagtaaaagaggcagtaaatttagcgagatctttttatcaaaatccattatcttttgagaaattagtagaattagcaggaattgaaactttactagataaattcactgataagttgtcaggtggccaattaaagcgagtttcatttgcaattgtaatggcaggaaatcctaagttagtcttcttagatgagccaactgcggggatggatgttgatgctagaaatgaattctggcaaaagattaacggttttaaaaagctgggtattactttcttgatcactagccattatccagaagaacttgaaaaagtagcaggccgttatttgattatcaataatcatcgcttagtttttgatggcagtttagagcaaatgaaagaacaaaaccagactgctcaagttaaatttgtcagtcagcttgaaaaagaaagttttactaaattaccagctttagcagaaattactgaaaataaccaccattatgttttaaaagtaagtaatttaaacacatttttgccaagctttatcaaatatatcaaacaagttgaaaatcttgaaatctctcaaagtaatctcgaaagcttaatgaaaaagtggatggaggactaatcatgaaaaatttcgcttatcaattaaaaattaatctaaaacgcttcttacttagaaatcccttcttctttatttttaccatttcttttcctgcgattttttacttaatttatactaaagttgcaattagtaatgctccagcaggttggaataaacggtttttagtcagtatgattgtttatggtattttagttaattcactgacgacactttccagaatattatcaagtgatgataaaaatggatttaagctctttgttaagttatcacctgctagtttaactagttattatgccaatatctttgtcgtatttgaaattatgaatctagttgcaattagcgccgtagctttagtaggtgtatttgttaataaggtaaacttgtcttttgaaaattggctcgttttactagttgcagtgccggttttgtgtattccttttgccttaattggtgtgctaatttcttttgttggtgatgagaatgcggttggagcattggctaacttactcatgtttgcaatcgcaattttgtcagggctttggtggccattaagcatcatgccagattatttgcaaaaacttggcaaaattatgttaggtcatccagtttcagagttaagtttaaacttactcctaaaacaaaacttggccactagtcaattacaaactttattcatttggctgattgtgctagttttaatcttaggacttgttattaaaacaaagggtcgtaaagcctaattactaaggagaaaaaagattggaagaatttttaaataggcatgtcctctttccaaaaaagtatggggccatgccttattactatttattgtttttgctggtagctttttttattgccttgccacttaaaagcttacttgattgggtttgcgttttagccttaattccatttgccaaattttatcgtgattcttatggagatgagattcccagatatgattgggaaatcatcggcatgattattattgcagctttatgggtgattaactaccaatattactataattttatctttgctggcttttgcattggttttagtgaaattaagcctcatatttttatgaaacgtgtaattctttatctgactgtaattacagcttgtgctatcttctctgtgcttaaacaggggcttgacgttaatttagcttttggtttaatttttacttattctagtgtcttttttgcccattcatttgcgatttctcaaagaaaaagattcgctttaaagcaggattatcagcgtttatcaatcattgttaagcaatctgaacgtgaccgaattgctggacaattacatgataatttagggcaagtcttttcaaccctggcaattagcgccgatctagctgaaaagcttgtagataaaaatccagccttagctaagaagcaaattcaacaaattggcaagaacgctcgggacaatctaagcttagtccgtgaaattgtagctgatttacgtaaacaaaagttggtccaagtcttggcagttgagagtgaaaacttggaaaacgcgcaatttgacttaacaacagagaatcaaaaacaagcctttgcctggcctaataatattcaaaatgagttatcatttattattagagaagccattgccaatgctattcgttatagccacggcaatttagttaagattgattttaatgaagatagcaataactattttgtcaaaattaaagacaacggtattggctttaaaaataaaactaataaacattccagtcgtgagcattttggcattagtgggatgcaggctagagttgataagttaaagggaagctttgcaatttctgataaaaatggggtagaaattagtattagcctacctaaggagtagttatgagacgtttatatttagctgaagatcaagagttgttaaattcagctctaaagatgttacttgatttagaagatgactttgaagtagtggggactagtctaactggtgaagatgtagcaaagcaaataatggatttaaaagtggacgtagccttactagatattgaaatgcccaaacaaagcggtctagaaattgctaaagagttgcgccagcaaaattatccaggaaaaatcattatcctaactacctttgctcgggctaattattttaaggaagcattagctcaaaaagttgatggttatctcttaaaagatagtcctagtgattcgctggtaaaggcaattagagccattttagaaggcaacactgtctttgaccccaagcttgttagtggcgtcttaaatgaagtcgataatccattaactaaacgagagttagaaattcttaaaatgcttgaacaagtagcaactactaaagagttagctcaaaggttgtttttgtcagaaggaacggtgagaaactatatttcttctattctcagtaagacaggaactgcgtcacgtttggaagcacttaacctagcgcgtgataagggttggatttaatttaaaaaatctattgaaagcgattgcgaagtgtgataaaatttcatcttgtactgttatgaaagcggtattatacattctgagatgaggacttaatatgaatacattcgcaattttaatcggtctaggaccttttgtgggttggggtttatatccaacaattgcaagtaaaattggtggaaaacctgagaatcaaatcttaggttcaacgattggaacctttatttttgcattaattgttactttatcccttaaaattcaattaccagttgggatgaattttgtcttttcagttttatctggaattggttgggcaagtgcacaaatcattaccttccaatcattcactttgattggatcatcacgtgcaatgccaatttcaaccgctttacaattaatcgtgacttcactttggggcgtgttagctcttggtgactggccaagcagctttgacaagacagtggggagtttagccttaatcctaatcatttgcggcgcttggcttactgtttggactgaaaataagagccatgaagataagcaaaccttgaaaaaagccatcttattattagtaattggccaagtaggttactgggcatattcagctgctccacaagctgctcatgtgtcagggttgcaagccttcttgccacaagcaacagggatggttttagtctctgtagtttatgctatcttcttatcattaaagcaccaaagaaagtcagcaattaaagaaaagatttcatacaagcatattatttcaggctttttctttgcctttgcagctttaacttatttaatttctgcccaaccaaatatgaacggcctggctactggctttattctttcacaaacttcagtagttttggcaactttatcaggtatttggttactaggacaaaataaggctaaaagagaaatgtttgtaactgttttaggattagtcttaattgttgttgctgcttcaatgactgttttggtttaataaagataaatatcaaaaaaaggttctctacttatgtaagtagaggacctttttaattgttttatttgtcattgcgcttttgcttaccagcattacgcttacgtagctcatcttctgcagtagttgaacttgttgaattaccagtattagtattatcagaaataatattatcaattatttcttttgttactacgaccttcattggcttttcttttaattcggcgtcgatttttgctttggctcttggcaagataatgtaagttacaattacttgttgaattaaagcaataattccgccaactaagaaataaagacctaaggcaccaggtgttgacattgaaatgaataatgtcatcaatgggctgatgaaaacagttgattgcattgctgctcgttgctgttcactaactccgcgaagcattaataaactttgtgccaagtaaaagagcgcaccaacgattgcgaagagtaatgatggcttaccaagtgatactccaaaaaagttcgatttatataaagcatctgaataagcaacagcttgataaataccaatcataaatggaaattggactaataaaggtaaacagccaattccaccagtgatacttaagttattttcgcgatatactttttgttgaagttggctaatttgcatttgcttatcaggagttaaagagcgatcttttaacgcatcttggattaacttgaattgatcttgcaaacgactaactttttcttgttgaatcgttgatttctttgaagttgaaagcattaatggtagaagaacgaagcgaattactgcagtaataatcgcaattgcccatccagcaccattagagccaccaatagcattttcagttgctaacatgatatttctaatgggaataccaataaattgatagattaatccaaaaaagccacctttaggtgctgcatttgcaccagtcttgtaggctgcacagcctgttaggataattgctaacatggctactaaactaactaatagtaaaatctttttattttttttcattaattaaatacaccacttaatttctatatagtctctgttttaaaaaaacaacttgttaatattttaccgtaaaacgggtcaatggtgctacatttgtcaactgcttttgttcaattttatcaattctagcagttggcccttgcgcatccggcaattcttgaataaatttgtctaaaatataatctttaccttggataaggatagttacgctaccatcattttcatttcttacccaaccttttaagaaaaatttcttagctaatatttgagtacaccatctaaatccgaccccttgaactaggccataaacatgaatttctcttgtttccataatttttctccttatgaatacaatctactatttaatattttaagcttctaacataaaatagtgtagtgaactaaggagaaagatatgcaaaaaattacatcaacaactaatcaaacaatcaaaaatttggctaagctcaataagaaaaaatatcgtgagcaagaaggatattatttaattgaaggttttcatttagtagatgaagcatttaaaagtaaactcaattttaaatatttattagcaactccagcagcatttgaaaagttaaatattcagtaccaattagatttgactgataaacgcttgattcaaattaacgaacgagttgcgaaacatcttagcgcgacaactaattctcaagatgtgtttatggttttaaaaataaaccagcctaagcattttacttttaattttggtaaatggatattgctcgattcattagctgatccgggtaatattggtacaattattagaacagcagatgctgctggttttaatggcgttgtcttatcagaaaactgtgctgatttatataatccaaaaactcaaagagcaatgcaaggaagtcaattccatctgccaataattaaagcagatcttttgaagacaattgaacaatttaaggaaaactatattccagtttatgcatcagttttagatgatgaagctaaggaattacctgattttgaaaaaactaaagaattagccttaatcatcggtaatgaagctaatggtgttagtgatgaggctgtaaatttagctgatgaaaaattgtttatacctataaagggtcaagctgaatctttaaatgcagcaattgcagctggaattatgatttatcattttgcttaagttgctcacttgtaattagtaagtgaaaacaagtataataaaattaataataaattttttaaaggaggaagacatatgtcaactacttctgaagaaaaagatggctgtcaaggctgtcataataaatatgaaaattgtgaacactttatcaacgcctttgcttttattggcaagaaatggaatggattgattattagttccttatgtagctttacgccaatgcggtttaaggacttagctaatgctgttcatgcgtgttcagatcgtgttttagtggaaagattaaaagaattagaagaattaaagatcgtcaagcgttcagtctcagatgcaggtatcattacgtataagctaactaaaaaaggtgcagaattaaaaccagtctttgatcaagttcatgagtgggcagatcgctgggaagtataaagaatactggttgcatgtttttgttaaaagttttaagatactaactataacaataaagataaaaacgttaagcaaggctagtaataagtttattacttaacagagaggattatttagctgagattaatctaagttatagcttatgaatttcaccttgtaagttgaattttaatcaattccggtatttcccgttatcgaaagttaagtgtagggataactttatccctaaacgagggtggtaccgcgaagcttcgtccctgttggggcgaggcttttttgtttagaaagggacgtagtatggatttatttgaaaaattggctaaattgcgtgatgaaggtttagcacaaattcgaaaagctgaaaatgaaaagaagttaaacgatgtaagggtaactttagttggtaaaaaaggaagattaactgaaattcttcactcaatgaaggaagttgctcctgaaaatcgtcgagaagttggtcaaaaagttaatgaattacgtgacttatttaaccaaaagcttgatgatgctaaaaaagacttattagaaaaattagttgctgaaaaattaaaagcggaagcagttgatgttaccttaccaggtagaaaaactcgcctgggttctaaacatgtaattagaattattcaagatgatttagaaagattctttatcggtatgggcttccaagtagttcaaggtcctgaaattgaaacagagcattataactttgaaatgcttaacttgcctaaggaccacccagctcgtgacatgcaagctacgttctttgtagatgatggtcaccttttaagaagtcaaacttcccctgttcaagctagaactatggagaagcatgattttgaaaatggtgctttaaagatgatatctcctggtaaggtttaccgtcgtgatgatgatgatgcaacacactcacatcaatttgcccaaatggaagggttagttgttgataaaaatattactatgggagatttaaaagggactttagaagcagttgctaagcatgtctttggtcaagatagggaaactcgtttgagaccaagttatttcccatttactgagcctagtgttgaaatggatgtttcttgctttaactgtgatggcaagggatgcccagtatgtaaatacactggttggatagaagtattaggtgcaggtatggttcaccctaatgttattagaaatgctggtttagatccggaagtttatggtggatttgcttttggattagggttagaccgttttgcaattttgaagtatggtgtagatgatattcgtgatttctatactaatgacattagattcttaacacaatttcgtcaggaggaagactagatgttagtttcatacaagtggttacaagatttcttaaaattagatattgatcccaatgaattggctgaaaaaatcaccagaactgggattgaaatagcatcagttgatcatccaatggaaggcttaaaaaagctagttgttggtcatgtcttagagtgtgaaatgcaccctgattcagatcatttgcatattacccaagtagatattggtgaagatgaaccaattcaaattgtttgtggggcacctaatgttgcagctggtgaatatgtaattgtagctttacacggggctagaattgctggcaatgaaaagattaagcgtggtaaaattcgtggcgttgtttcaaatgggatgatttgtggtttacaagaaattggcttcagcgatagtgtagtgccacaagaatttgcggatgggatttttgtatttcctgatgcaattaaacctgggactgatgtttatgaagctttaggaatggatgactacatcttagattttgatattactcctaaccgtgctgatactctttctatggaaggagcagcatatgaagtaggtgctattgttggtcaaaagcctaaaatcgaagatgttgttttaaaaggtgatggtagtgattggactaaagaattgagtgttagtgcagataagaaattagcaccaaaattcttgatgagaaaagtttccaatgtaaagattgctccaagtcctctttggttgcaaattcgtttatggaatgctggaattcgtccaatcaataatgtggttgatgctactaattacatcatgcttttaactggccaaccaatgcatgcttatgatgcaaatgcctttgctggtaagtgcgaagttcgcttagctaagaagggcgagaagttaaccttacttaatgaaaatgaattagagttagatactgaagatatcgtaattacagatggttctaagcctgttgctttggcaggtgttatgggtggccttaattctgaagtaacttcagcaacaactgatgttattttagaaagtgctgtttttgatcctgcattagtcagaaaggctgctttacgtcatgatgcaagaagtgaatcatcagctcgctttgaaaagggccttaactgggataatacagaaaaagctctcaatatggcagctttacttcttagaaatcatgctgaaggtacagttaatgaggggattatttatgctcaaaatgaagaaaagcctaaatgtgaaattactgctaaatttgcctactttaataagatcttgggtactgaattatcaaatgaagaaattttagcaatttttgatcgtttaaactttgaaactaaagtctcaggtgatgaagttactgtaattgttccaagtagacgttgggacatttcaattaaagctgacttggttgaagaagttggccgaatttatggttatgataatattaagtcaacgcaaccggtacttggtcaaacacatggtggctataatgcagatgaaacaaaagtaagacatttacgtcacttagttgaagcccagggacttgttgaaactattaattactcattaactagtgaagaattggcaactttatttgaagaaaaagccttagctcctgttaaagttgaatggccacttaattctgctagaacaacgatgagacagaacttaatggctagtttggttgaagcagctagttataactttgctcgtaaacaaaatgaagttagaatttttgaacaaggtcgcgtatatgaccatgaaagtgatgaatataacgaacatactcatttagctgcattatatactggtacagctgaagaaactaactggcaacatattgacgaaaagattgatttttactatgttaagggtcaagttgaaagtttatttgatgctgtaattaaaacttctgccaagattgaatataaggctcttaagttaccaggtatgcacccaactagaactgctggaatttatattaatgatcaatatgttggttttattggacaaattgcaccattacttaacttatttgataagaatttacgtggaaaagaattatatggttatgaacttaatttagatttaattttgccacttatggatggagaaactaaatctatgccagctcctaagtatccaagtgttgaacgtgatatgtcattgttagtggctgaaaatataaccagtgatgaagtagcaaatgttattcgtgaaaatgcaggtaaatacttagttaaacttgatgtaattgatgtatatcaaggtaagcatattgaagcgggtaagaagagtttggcttataaattaacattcttaaacgaaaaagaaactttgacagatgaagttgtaactaaggcagttagtgcagttagtgaagctttaactagtcaattagaagtagaagtacgttaatctattgactttcattagtgaattaaatattattgactggtgaaatatcaataaagggagattaatatgccacaaaaaacatatccaatgactgctgcaggtaaagaaaagcttgaagcagaacttaaagaattaaaacttgttaaacgtccagaagttattgaaagaattaaagtcgctcgttcatatggtgacttatcagaaaactcagaatacgatgcggctaaggatgaacaaagtgctgtagaacaacggattgcacaagttgaacaaatgcttaaatatgctgatgttattgatgctgatagtgttgatcccaatgaagtttcagttggaaaaactgtaacttatactgaagttggtgaagatgatcctgaaacttatactattgttggttctgatgaatcagatccattaaatggtaagatttcaaacgactcaccaattgctcaagcattgcttggtaagcataagggcgatactgtttcaatcaatacaccaggtggaagttttgacgttgttattaatgatgttaaagcttaataagtagttttatatatgagaaaagagctgatacagattgtatcagctctttttgtaatgatttttattggttacgcttatgataaaaataatatgctaaaagacaaattccagttattagacttattaagaggcctaaatagaattgatgaggaacataaacaaattttatttgatgttttccatcaactaactgaatttctaaaaaggtatttgtaaatttagtgtagttaatttttttaccgttgtcataaataacccaattattatcataaggaatactagttctaagtgtttgacttccactagttgtgaaagttgaagtctcaatagttccagcttttatttcttttacagtgggttgattttccttaagtttaatcaaagtatcagtaagatgctttgaatttaattcccaaataacaatattagctaagttggctttattttttaataacgtgaatgtaagtactagtttctttcctttttgcttgttagcaatattaataagtctgacttgatcgtagcgagcttctatatcaacgttttccccattgatagtaagtgaagcaacttttccagttaaattagctggtaattgtaaataatatgaattatttgtttgaggtgtaaaagtaaaggaaacagttgctgtttgtgagaaaacctttttttggtagttaaaattaccattggttttagcattttctagttgggcgtttggtaagttaattgtggtaaacaagttagttttgtcaccagttgcagcagtataaaaagattgttggtttttgattggttcattttcaaagtaattagtagcccaatttctttgagaaacatacgccaaaggtaatgctgtttgattaattgcataagatatttgtttaaagtcgccaccaaaagccatggaattaatatcagtacgatatagttgattattatatttcattcgctgactagtcttaacgttatcattaccgtaataaggctgtaaggtgtattttactcccagcaatgaatccaatacttgagtagaaaacttattaataaaagcattggaattatgagctaagccttgataactaataaagttagtaattttagaattagcaattgaattgaagactgaaagaccataataattatcactaaatggatcatcgtcagaacgagagaaagtcttttctaaacgatataaactactatcatgccttttaatgatagtagtagcatttgcaacattttcagtaaagttactgtagtcttcatttacttggtaagaaatactatttaagcttgagcttaagtttaaggcagtagcaataatcgtcaaactcaagattattccttgtactaggatatttcttaaaggaaaggcagctacaataataattaaaagtgcagcaaaaactaaactgattaatactttattatggtctaaaaactcaaacctatttttggttaataaccaagtgaataaaccaactgatactaaaataattaatattaattgtgcaattgaaaatttggcttgctttgataaaactttaagtgcaaattcaattaacaaaaagctaataacaaagctaaagcgagctggataccaggttgggaattggcctaaatgccaaaatagaactaagggattaaaccagcaagaaacaaataaaaatagaattaaaagcgcattactaaaacgttctttaagactgaatttgttgctcaaaaaataggttaaactaaccagaaaaagtaggactgtaatatatacattaggcaatccagtttgcatctcatggaatgtataagagccggaaataaatttacctaacatcttataaggggtaaattgaattccccaattaaagacagcactactatttttattattaattatttcatatattgtgggaattaaggcaaaagcagctaataaggttgcaataacagatttggccaagtagttgaataatttcttttgccaattagtaggatggttgtataagtaaatacaaaaatagaaaaatccaaatactaaagccatatagcccgtataaaaattagtaacccatagtaagaaggtcacaagaattaaccaatttttttgaccagttttgcgaatttgaagaattaatagtggcaataatattaggctatcgagccacatcaagtttaaattataggcaataatatagcctgataatgcaaaggcaatactgccagctaaggaatagattttttgataatttttttgaaaataataatagctagttaagccgactgttcctactttaagtgaaataagccaataaatagctattggcagttggcttttagtgaaaaaaagcaagaggatattaaagggactagctagataataaaagaaagtacctattaaactaccacctaagccattggtaaagctatagttatatgttgctgggttaaagaagtgatctttataaaaggcaagtaaatcaatatattgctgtcctaaatcaactgttaggattctcataccatgcatagtaaagtaactagcaaaaatggcaaagggaataaaaaaactcaataaatataagattgtattaatgtgtttgttttgataattcattttcattttcttcatttgattaagatttaaaaaacattgaaactaacattgggatatacatagcataacacatagctatctgctaaaatattgactgtctagtgaggttgattttcttgaattttttacaaaataataatcataaatctgatcgaaaagcggcagaaacgccaatcagaatgaaaataattttaggtgtcatttttattttatttgcaatgctgataggacaactagcatatttacagttaatttatggtagtcgttttcattcagaagtacaaaaaacagatgatactgtagttactagtgcagtgccaagaggtattatgtatgacgataaagggcgcgtcttagtaggtaataaggctaataatgccattacttatactaagggttcatctgttactagtaaacaaatttataatatttctacggcattgagtcaatatattaccattagtaatgaaaagccgaccgcattacaattagcggcttattaccttggcaatagtcgcaattatgccaaggaatatgctaagttacctaagtcacaaaagtatgattctgatggaaatgagctaagcaattcaacggtatattcaacactggaaaagcaagttattaaaaataaaaggcattataccagtagggaaaaaacagctgccctgatttttaataagatttctggtgcctatagcttatctacaatttatattaagaatcaaaacttgacagataaagaagttgctttagttggagaacatttatcagaattgcctggcgtcggaataggaactgattgggaaagaacttatccaaatggttcttcaattaagactattattgggtctgtttcttcagaaaaagctggtttaccaagtgaaaagttgcaatattacctagctcaaggttattcacgtaatgaccgagtagggacttcttatctagaaaaagaatatgaagctttacttaaggggtctaaaactgaaagtaaattaaccactaaatctaatggaaaagttacacagactaaaaccgtgtataagggacaagctggtgctagtttgatattgacacttgattcaaaataccaagctaaagtgcaaaagaaattgaaatcagtctattcttctgctttatcagccggtgctgcacattactcaagtggtgcttttgcaattgcactagatccaaataccggtgcaattaaggcagtagcaggtctagatcacaatgtaaaaactaataaaattacagatgatgctttaggtattattaaccaatcatttgttatggggtctgttgtaaagggtgcacaagttgcaggtggtttgatcaataaagttattaccccaagtagtaatactttgcctgatacaccaatttacttaccagggactccagttaagaaatctgtttatccaattggaacttttagttcattagatgctgaaacagctcttgaagtatcaagtaacatttacatgatgcaacttactttaagatggttgaatgcaaaatatactccaaaaacatacattcatatgccaagtgatgcatttgatattttgagacgtaattttgcgatgtttggattgggacaaaagactggtattgacttaccaggagaaatttcaggtattcaaggtaagtcttataattcatcaggccaattgctttctggttccgtacttgacgaatcctatggtaactacgatgcatatacaccaattcagctagctcaatatatttcaacaattgccaatggtggttatcgaatgcagccatatttggtgcaatcagttggacagactaattcaagtggtactaaagtatcaattaattactcaaaaacaccaaatgttcaatttagaataccttggacaagtagtgaattaaatgtcattaaaacagggatgtatcgagtagtacatggtacaaatgcttgggggacagctcatacattgaagagtgttaaaccaagtatttcaggtaagactggtacagctcaaactttctattatgatgctagtgcaagtaagaaaaagaatagtagtagtgatccaattgaattaattaatgcaacttttgtaggctttgctccatcaaataaaccaaaattagctgtagtagtcgttttcccaggtttagatcctaatttggaaggtacttacacattgcaagttgctaaagaaatggtggaagattactttaaattaaataaatacgcagaaaactaatattttttctggtaaaaattagcgaaaaatgctatcattgaacagtcgaaataaatttaataggtggtggaagaaatggcagataacattattcttgaatgtactgaatgtggcgaaagagactacttaaccaagaagaataagcgtaagcaccctgaacgtttggctttaaagaaatattgcccacgcgaaagaaagactacgcttcaccgcgaaactaagtaattactaagacaacaggttaaaaagcctgttgtttttttgttataatgttaattatgaagaaaaaagagttaagacaacggcaaattcatcgcttacaagaatttgctaaaaaagatcgaaaagttaaagaggatattttattacaaaataaatttttagctaattcgttacttgaaggagtgaaaacaatcggtgtaacttgtcctttaaattttgaaattgataatcaaataattattgaacaagcaagaagagaaggaataaagacctatttagctaaaagttatcctgataagaggatggattttgtttattttgatgaacaaactcagttaaaaaaatctaactttggtattttggaagtagctaatcctatagaaattaataatcaattagatttattactagtacctggcctggctttttcaaaagcaagccatgatcgtttaggctttggtggagggtattatgaccgctttttagctgaacataattgtaaaactgttagtttagttaattcggttatgttgtttgatacgccagcttggccaattgaagaaacagatcgacaagttggagaattaattgctttaaccaagtaaaatatattcataaactaaagagaagggtgaggaatagcgacttatgaataatccaagacttaggaagtactataagactaatgcaatgactaatactatttttgtggttttagtcgcaatgtttataatagaaactcttcgtggaggatcagacgaatctgctgttttatttaaattgggtgcccaatttaatccagcaatcataatattaggccaatggtggcgactttttacagctcagtttttacatattggattgctgcatttagttgttaactgtgtcacgctcttttatatggggcaatatttagagccaatgttgggacatgttcgttttttaattatttatttattagctggagttggtggcaatttaatgactctagctttgggtagtgataatgcagtaagtgctggtgcctcaacagctttgtttggcttatttggggcgatgattgccttaggaattgctaatcgtactcatgaaggaatggcttatttaggtagacaatcatttgttttagctgtaattaatctgctatttgatattaatattccacagattgatacttgggggcatgttggtggtttacttgctggatttttattaacagtgattctaggagaccaaaatttacgtggctacaaattaccaataaaaattttggcaggatttgcattaattgggtttgtattaattagtttgagattaggatttattatttcagaataatgaaaactttgtatgatgtgcagcagttgctgaaaaaatttaatattttagtttatgttggtaaacgaaaatgggatattgagctgatggctttagaacttgataatttacatcacgctggagtaattagtcaaaaggattatttgagtgctaagctaattttacgacgtgaacatgaaattgaagaaaagaatgaaaaagagtcgtaagagcggtattataaaataaagaaaaagttgaggagaaagttattgtgaatacttttttattagttattgatgcaattttattaattattattttgtcatttcttttttcatggctttggaataagtaccaagctaaaagagtaggtggtgctttaagtaatgaagaatttagagcagggatgcgtaaggcccaaataattgatgtgcgtgaaagtgcaccatttaagcgtaagcatatcgatggagctcgcaatattccaatgactatgtttaaataccaacatggtgaaattagaaaagatttaccagtttacctttattcagatgcaagttctattaccttgcgtgctgcaagaattttgcaaaaagatggctataaaaagattttctggttaaaagatggtttagaaaattgggatggacgtactaaggcatcaaaatattaattaaacaaaaaaacttgctggtattatcctagcaagtttttttagtgatttataattataatattaagtaacaattcaaaatattgcttttaacctaagtgagctgagtgactcttacggttagcgcgaatacggttttgttcaattcgcttagcttcttgttcagcagggtctaataccttctttttataagtgaagactcctgctgcaattgtacctaaagtagtaatcattccggtaacaaaaccggctccaaactttttagccattttgaattacctcctagttcatttactttaattttagcaatatttatcattttattaaaggaaaaggtatgcaaaaaataatagttgtagtcggaccgactgctgttggtaaaacaagtctagctattaaactagctcagcaggttaatggacaaataatttctggcgattcaatgcagatatacaaagaagtttcaattggaacagcaaaggctactgaagaagagcaagctgcagcttcacatttattaattaatcaaaagtctgtttttgaggaatattctgttaaagattttgtagctgatgctactaaggcaattgataaaacgattcaaatgaaaaaaatcccaataatttgtggaggaacaggtttttatatcaatgcattaattaataaaatgcagcttggggaacctggagaatatgaaacaagtgttgagccaaaatttgaggcttttttagctgaacatggatctaaagaattatggcaacttttacacgaaaaagatcctcaagcttgtaaaaagataccagttgaaaataccaggcgagtattgcgtgctttaacggttattgaccggacaggaaagaaatttagtgagcagcaaacaaaaataacgcctagatatgatgctttattaattggcttaaatagtgaccgccaacttgtttatagtcgaattaataagcgcgtagatataatgatgactgatggattgcttgacgaagcgaagtttgtcttcgaaaatcgggctaaggaatatcaagttttacaagcgattggttataaagaattcttcccttattttgaaggtgaaagtgatttaacaacctgtgttaataaacttaaacaggcttctcgaaaatatgctaaacgtcagctaacgtattttagaaataagttaagtgtgaattggtatgattctttaaatgatccagcttattttgataagattttaacgaaagtagagcaatggcaaaatgtataattatccaaaagaattaagagatttagtaaagactgtagatcagcagatagcgcctaaatttgctgaattagatgagcaagttgtctataatcaagccaaggtcttagaagcttttaagcatgctaatgtagctgaggctgatttaaaaggaactaatggctatggtgatgatgataccggtcgtgataagttagaagctatttttgctgaagtatttcaaactgaagcagcattagttcggcctcagtttgtttccggcacccatactttggtaacggcaatgagaggtaatttacaagcaggggatattttaacttacttaacaggtatgccatatgatactttacaaacagtgattggacttactccacacaagcaaggaactctgatgcaaagaggcattagcttctcatatgtcccattaaaagataatcaagttgattacaaggcggctaaagaagttttgcttcgagataagcctaaaatggttgccattcaaagatctaaaggctatagcacacgtcctagttataatgtagagcaaattaaagagatgattgcttttgtcaaagatattttaccagagacaattgtttttattgataactgctatggtgaattttctgaaaagcatgaacccactgaatatggcgcggatttaatggcgggctctttaattaaaaatggcggtggcggtattgccaaaacaggtggctatattgttggtaaaaaagagttagttgaaaatgcaacatatgagttattagctccgggttgtgaagatgaaggtgccacgttgaccaatatgcaggactttttacaaggcttttttatcgctcctaatacggttgtcaatgcaattaaagggatggtctttagcagtgccttgttagaaaaaatggggcttgaagttgctccaaaatgggatgcggttagaacggatttaattcaaaatattattttccatgatccagaaaaaatggttaaatttgctaaagaattacaaaaaaattcaccggttgattcttttgtcgaacccgttccatacaatatgcccggctatgaagataaagttgtcatggctgcaggaacttttgtttctggttcaacaatcgaattttcagctgatggtccaataagagaaccttatgccttatacatgcagggtggcttaacttatgcccatgtaaaaattgctgtgatgaatgcagttaatgagctattctttaagaaagtttaaatataagtaaaaaattagagctaaatttttagctctttttttagaccaatttttagtttaggcttacttgcatatgatttttttacactttataaaaataagtaataaaaaattaatcgcaaaaaataactataccagtttgacaaaacaaaaaacaaaggctatgatattgctatgttcttaggagatataagtaattctaggactataccaattttgctacgatagaaagattttgttaacaggtggaaatatgaaaaaagtatacacagaagaagaaattcgtaaaattattagagaccaaaatgtacgtttcttacgtttatgctttacagatatcaacggaacattaaaaaatgttgaagttcctcttagtcaattagataaagttttggctaacgaaattcgtttcgacggttcaagtattgatggctatgttcgaattgaagaaagtgacatggttttataccctgacttttcaacttgggcagttttgccttggggtgacaatgaaggcggcaaaattggtcgtttgatttgttcagttcacaatactgatggtactccatttgctggtgatccaagaaacaacttgaagcgtgttgttaacgaaatgaaggaaatgggttatagcaactttgaaattggttttgaagctgaattcttcttatttaaagaagacagcgaaggcaactggactactaagccaactgaccaaagttcatactttgatatggctagtgaagatgaaggcgctaagtgtcgtcgtgatattgttgaaactttggaaaagattggatttgaagttgaagcagctcaccacgaagttggtgcaggtcaacaagaaatcgacttccgctttgacgacgcagttgcaactgctgacaaggtcttgactttcaagatggtcgttaagcaaatcgctaagaagcatggtttacatgcaacctttatgccaaagcctgttgaaggtttacctggttcaggaatgcacactaacatgtcactattcaaagatggtaagaatgtcttttacgataaagatggcgaatacaagttatctaagactgctctttacttcttaaatggtatcttaagccatgctagagcattaacttgtgttggtaatccaactgttaactcatacaagcgtctgattcctggttttgaagctcctgtatacatttcatgggctaataagaaccgttcaccacttgttcgtattccagatgctgaagaaattggtactcgtcttgaaatgcgttcagctgacccaacagctaacccatacttattattagcagcttgcttaaaggctggtcttgaaggtatcaaagaagctaagatgccaatgaaaccaattacttcaaatgtctttgaaatgtctgctgaagaaaagaaggaaagaggtattattgctttaccttcaactttgcataacgctactaagtacttcaaggaagataagttaattcaagatgctttaggtgaacacttaactcaaagctttattgaatctaaagaacttgaatgggctcaatatactcaaagtgtttcagattgggaaagaaatcgttacatgaactactaatatgtagtaataattatctaaatactataaaaggagaggtttatacctctcctttttatattgctgttaaaatatcacaagctagagccatgacatccttttgacgcttttgcccccaatttcgttcatcatgttcaaaattagctaagctgtcagctgagtatagaatttgagcaaattgaacattgcgtaactgacagcaagcagccattgcagcacattccatttcaacaaccgaaattccctcagctaggtgctgttcaactttagttttagtttctctgaaaaaaccatcagttgtccaagtagttacttcggtgtagggcaggcttcttttttcaagttgctctttaacttgtgttactaatggactagataagatgatgtaacggcttggcgctacatagtgaaaactggtgccttcgtcacgcagggccttagttggtaaaaagaagtcaccttcattcccagaagttaaagcaccacaagagccgattgctagcacttcttttacaccataagcaattaaccagtcaagaagctgcacagcagcactagcgcctagaggagggtgaacaagtgaaagagtttgattatgatactgaacttgataaacagaaaagttgcaagcaaaagtctcaaaagttgccacaattttataatctttatcagctaaaaaagcttggaaattttcatcagtgacaaaaggatagacaagcttgtcagcaaaatcgcatcctaaattttcatgattaggattaagaaccgcattaggatttgaatcaaagttcattaatgataattcttccatatttttcaccttttaataaaatttatttaataatatcattataacatgattggagcaatttctttattttttaaataaaaaagtgtgaaaatatttgttattatatttttccattttgatttgacaaaaatcgttcaaactgatatcgtactatagaatttgtttgcttttatatagtaaggagatttttgatgaagaagatgcaaatcaaagcaattgtagttagtggcctaattggtgttatgttattaactttaactggatgtcgagccaagcattcacttagcaaaaataactataaaaacaaatattcaattgctttgattaccgatattagtggtgttgatgatcattcatttactgaagctgcttggaaaggctttgaagcttttggccaagaacatgagcttagccgaggaatgggtggttatcaatattttcaatctaatagtgaaggagattttgttcctaattttaatcaggctgctaatgctggttttgaaaccttatacggtgttggttatgccttgaaagaagccgtttcatcggcagctcaaaaatatcctaaaaagaactttgtcattatggacgatgtcatcactggtcaaaagaatgtggtcagtgcaacttttaaatcgaacgaatcatcatacctagcaggtgttgtagccgcgtatacaactaaaactaataccgttggctttattggtggtgctagatcaactgtcttagacttatttgaagctggttttaagcaaggagtaacagatacagctaaaaaattgggtaagaagattaccattttagatcaatatgttggtgactttacttcaacagataaggctaaagcaattgctcaatcaatgtatgctaaaaaagctgatatcctttatcaagccgccgcaacagccggcaatggcgtcttccaagaagcaaaaaatctcaacaaaacaagaagcgaaaagaagaaagtttgggtaattggtgttgattcagatcaatccgctcaaggtgaatatactaatagtaggggtaaaaaagataattgtactttaacttcagtgttaaagggactgggctttgcagttaaggatattgcagataaagcatatctcggtaaattcccaggtggcaagcaccttgtttacggcttagaacataatggtgtttcaattactaaggggaatttatctgctaaagcttggcaggaaagtcaagaagcaagaagccaaatcattaatggaaaaattaccgttagaacttcaccaaaataagaaaagatagataattaagtgcctcatagttgttagatatgaaatctgatgattatgaggtgcttttttatggtagaaaaaaatacacgacctctgtaacatacagaaatcgtgtagtatcaactattaataaattatttggttaaaaaatcagtaatgtgtacaacttcaattccatcgattacgccaacatcatcccaattattagtaataataatttttcgataaccagttggtaaatgcaaaaagttatcagtttctctagtattattttgaggaatttgattagtaacttgaatataaagggtatcactgtcattttttgctacaaaatcaatttctttagtatcgtattttcccacaaagacttcatagtcacgacttaataattctagataaacgagattttcaatttttgagccacgattaattctttctctacgtaattgagaacggacaaatcccaaatctactgcataaaattttccttggcctttaagtagctcttttccacgaatatcatagcgtgggactttataaaatagaaaagcatcttgtaataaattaagataagcttcaatggtattgttactaatcttgaagccactagatcttaaagtattagcgattttattaatactgataagctgaccagcattaccaagtaaaaaaagtccgacccgttctaaaacttcagtatttttaatggttgctcgcccagcaacatctcgaagcaaaattgagttataaattccacttaaaacatcacgctttaattgattattatcttgtaaaacaactgaaggaaaaccaccatattctaaatagtcgttgaagtggcgagcaggatcatcttgttcatagtttttaaatttcaagtattctctaaaggtcaacggtaataccggaatttgaacataacgacctgttagatagctggcaagttctccagaaagaagtgatgcattagaacctgtaatataaatgtcagaatcaaatgctacacgtaggccattaattaatttctgccattcatggacttcttgaatttcatcaaagaaaaagtaagtctttttacttttatctacttttttctttaggtactcatataattttctgtagtcaagcaaatcaaaatattctggattttcaaagtttaaataaatgatttgcttttctgaaatacctcttttgagaagctgatctctaatcattaataataagtagctttttcctgaacgacgcactccagtaattaccttgataaactcagtatcaatcattggttcgattctttttaagtataaagggcgaagaattggttccataattttctcctaactgaaaacttttagcttttttagctaaattttctctgtactgaaaattctaccaatattttagcataattttcagtgtactgaaaatttagcaaaatactcaactaccttttattaagcaaaaatattaaatcaagttagagcaaggactataatcttggtatgatataaataggactaacaacaaattctaggaggaaattatgggaaaaaatcaaggaaagactgtttatactaaagatgtaattttagttatggtggcttcatttttcttcatgtttagcgtgatgtttgttacgcctttaatcaatggatatgcgattagcttaggtgctagtagtagctttgccggatttgtagtcggaataatgagtgttgcttcgctatttttgcgtcctattgcaggtaatattactgatattttttcaaaatatcggttgtctttaattggtggaatattgattgcaatcggaattattggatatgtaatcacacctaatagtgagctgctcttattattcagattgataaatggaactggctttgtgctatgcacagtatgtatgactacttggcttggtgcgcttgttccgcgaagtcatgtcggacaagcaatgggcttttatggcttaatgaatgcgttagatatggcaatcgcaccagcaattgcaattgatgtttatcatacaatcggctatcgtaattcatttgttttggcagcagtagccagcattttgatgattattgtcattcaattcgttgaaaatcatgccttgccaaaggtaaaagaaaataaatccaagaagaagtttaagcttattcaaaagaatgcctttccagttgcgattttaacagctttatttgcgattccatatttcattacccaggctgatattgtaacttatgcagaacagaagcatcttgatattcatgtaggcttttattttgtgatttatgcaattgttttattaggattgcggattgtgttgaagaatttctttgacactgttcgctttggtatttggctttatgcagcagcagccagcatgttcttgtacttactattattagcgattatgactaatgatttaatgatggggcttgccgcaattggaatgactgtggggtatggaattatatattcagtcttgcaatcaacggcgttattattagcaccacttgaagaacaagggttagctagttctactttttatatgggaattgacttggggatgagctttggaccaattattgctgggttcattgatacttatttgccaattcaatatttctacttggtacaacttgttttggtaccgttagttttaatagtttacttcgtttatcgcaaacagttaaatggagcgattgatcaacattaaagtgaaaataagaaagtcatcggaaaatcctgatgacttttttgttactaatataagaatggaataacaggggaaatttgtttgaagaaggcatttttagtttctaaactgcatttccaaaaccaagtaccttctttatgaaatccataaaatattgcgtagattaaatcaaatcccaaaattgctagataaggaattaaaactaataaagcatcttcattagctagattgccccaaataatcagctgcaagccaattgagaaaaacatgatgcctgagtaattgcgatgctgcttaattacaaaaattagaataagagtcataactattaatgaaactactccgtcaattattagtaaagaagtataagttaagctagttaaaaccttaacagagataaccaagattaagttaaagagcccaaataatatacttcctttaatacctggcagtaaatccttaacctttaaattggtatttgtagcaaggtaggttcgtgtaagcactgtggatacaataataatgcaggggatgatgtaaagaaattgaagtaacattttgtctacctcctataacttttattgtttgtctttaccaatgtcaaaagctgctaacataaataaaatagttccaatgctaagacaagttgttgcttaaatatagcacttaataatagaagaattacccaaagaattgcaaatttttaatcaatctgtgactagatataggataatcaagcgtatctaaaattccaagtattcctacactagtaattaatgcggaaagaacaaaattaccaagtaaaagcctataaagaagtgctagaatgattgacacgaaatctacaaaaaaatcaatttttctatttttgttgatgtgatattttgtgaaaaaactgtttttcattctcgtcacactttctagttattaagccatcttcttttgagatattcttttttaatttaattatacagcaccccccaatttttgaaagcggttttattattgagcgataaaaaagcaaatacaatctaagaattgcatttgctaaaaatattatggttctataatttttcctgttgatagtttatttgagttaaactgttaacaggttttttattgcaaaaaaagaggccatagcccctctacttacaataaaattcaacacgactcaaattttaatagattgaaggtttttctatgtcctcttacaatgattgtattaaattttcactcgatatccaagaccctaatatcacttttaatgctcatttctttaaattaattaacggtattaagtataaggtctttcaagctactcttattcagcctgcttgtcctttttgcggttctgttaatctgattcataatggtcatcttcagactaatattagatttattacttctaatgctagtagtcctgtgatcatcaggttaaataagcaaagagttctctgccgagattgtaatactcgttcaatggccaaatctaagttagttaataaatattgttctatctctaatcctgccaaaagaaaggttctttctgctttaactgaggaccgttctatgactagtattgctcgtgagaataatctatctgttaatactgttcaacgcgttttagcttcttgttctcatcgttttattgataactataactatttacctgaacacttagcctttgatgaatttaaaggcgtcgataaaaagctacactttatttgtcttgatggtcaaaagcatgaagtggttcaaatcctcagaaaccgatacaaaaagtctttacttaaatactttgataaattctctcctagtgctcgtgctaacgtcaaaactgtttctatggacttaaacttttactatcaaaatattgttagagcttgtttccctaatgcagaaattatcattgatcgttttcatatggtacagatgttaactcgctcttttaattctttaagagttttagtcatgaagtcttttgataaacgagcaaggcaatatcaactgctcaaatcaccttggaagctttatcttaagtctttcgttgatttagataagattcaccctcattataattggcacttcaaagactatctaactcaagaacaagttgtaatggaaggtattagttgtgatccaaggctagataatgcgtataatttaatgcaagactttatggctgctcttaaagctagagatactaattctttgaaagaaataattaattctaaagctgaggttggcactttgatgcacaagactttattgacctttaagcataacttacgagcagtcttaaatggtgctagattcagctactctaatggttgtttagaaggtttcaatcgtaagattaaacagattgagcgtactgcttatggttactcaaattacattaacttactaacaagaattagattagaagaaaacaaagttaaagaaaaagaaccaagcaatttatatattgcttgattctttaaatcactctttatcaacaggatttgacaaagagccaatattattgaatttataacatatctccatacctaaaaagccactctccaattacggtgagtggctctgatttaggaataagtggacgtctttcctataaagaatacaggcaagtgtccgcgtataagaatactatatttatattatttacgcaataaaaaatattgatatattaataaacttacagaaaataggtgtaaatttattaatagcttacttttgccaaaaagataatgcactgtgtgctaagtcaatagtgtaagtttcttcttcaagtggtcgtttagtcattgcttgatccgttgaataaacaattaaagctaagcgactgccacgtggcatcttgtagtaagttggttgaagtaagaagtctaagtcaaccatttgtccagcttcaatctggcttggacgtttcatgtcttgatagttttgtaagttcatatggcctttgcagattaacttagctttggtttctttatctggcataaactcttgtaaagtatcaacgccgaagcgatatcctaattcttgaccaccaggcataataaatttaggtgtagcagttaggcgtttacgtttgcctaattcaactagggcacaagataattgccctttagctaagctggcactgacgcgaatacgaacacgtggacggccattaatggtaatcgggtgtgcatattcatcgctagtaaagcgtaggctggctttagcccatttttcttcaccacaaataaattgatattcccaggctgattcaggaattttagctgctttaaattctttaccaccaaggtcggtaaaggattttgcagtatgaccaggaagattcttattcaagctcatgtcgtcgtttaggtagtagacagcttcgctaccttcaccagaccagtcagcttcttcatgccaagtgtcggcttctaagttgtcttgaatcattacttttggccattgagtaagtgctccattttcaatattaagaagttcatgaacaaaccataagttcattaagtctgtaaagtcaattgaaacaaggttattcatattatagtgaggaccttggtgtaagaaaagatgagaggcaattggtaatttagaaactttttgccagagtttatatacattcttaggtttaacattccagtcgttaagtccgtgaacactaatgaatgagcatttaatgccatcggtgtggtgacgataatttctagcttcccagaagtctgaatattgtccagtagttcgatcactcttagttaataaatctttttgcatttgatcatattctgcttggaccttaagacgactgccagcgtcccaaaggttagattggcatgtttctgctagcaagtctaaatcttcaccttggcaagcttctggagcgacaactagaccgtgttcacgatagtaatcataccaagatgaaatggcagcttcagaaacaacagtcttaagacctgccacgccagtagttgcaattgcaatttgtaaagtaccaagataagaacgaccagtcattccgacattgccgttgcaccagtcagccttaatttcagtttgacgactgcggtcagtgtaggcaatgcggtcgccatgaagccattcaataatttctttggcactttcagtttcttcaggagatccagtgattcttaaaccatcgctaccacgggtaccaattgcgccagcataaacattagcgaatccacgagccagcatatattcgtttaaggtgtaagcggctttgtgaactgctacttcactagcttgactagtattgtcacttggctttttagcaggaacggttggcattgccttatattgcgggttagaccaagaacttgcatcacttaaattttcatcaacattgtggttgcgcttaacattatcaataattccgccaaagtaggggtccgcagtgtataaggcgggaagcttaaggccaacatttgattcaggtactctaaaaattgtaacttgcaagaggtcactttctccatcttgatcagtatctaaatcactttctacataaaccacttcacgaattaccttgctagtgttgaaaacaggaagacttttaccgttaaagaacatgaatttattttgtccataaaattgggtaaagtagccaagtccagccatagtatcaatgtaagtttgaccgtttttagcacgagtgtttaataagagataaaaggccgaaattaagtcttctttattattaatatcgccaaaaataggaagggcatttttcttcattaaatcagtaggcttgtcgaattcgtagtcataaactatgtgatagccgagtagttgcaatgcagcacaatagaactcatcaactgtaatttggctaggattgttttttaaaaaatctgccaaactagttttattattaaccgcaaattctgctaatttagcttctttactagcattagtttttgcttcaacaattgcctttttaaacaagtatttaaataaatcagcgaatgaataatcagcgtaatcacttggcaagaaattaatctcagttagttctttaactttttgatcaaagttggttttgacaagggcatattggttatatttcataaatgttctccttatttaagccataatttttgataaacatcttctttaaagccgcaggataagttttcaccatcagtgattagcggacgtttgattaacttaccatcacttgaaagcaattctgcagcttcttcatgagtcattgaatcgagtttgtcttttaaatgcatttggcgataatgttggccactagtattgaagaaataacgcaacccccgattttggtacttattaaaccagtcgataaattttgctttagttggtggattttgcgtaatatctacaaattcgtagtcaacattgtgttcatcaagatatttttgagccttgtttgaggtagagcaacgacgatatccataaaatttcatgagcgtatctcctttaggattatttaataatatagtaatattttttgaagattttaggaaatgatttaattgataattatggaaagaacttagcaaattatttttatcaactttttgttgacacataaaaatcaatcacatataataatctatgttgctgatatggttcggtagctcagctggatagagcaacggtcttctaaaccgtgggtcgtgagttcgaatctcacccgaatcaccagtaatatcaaggcttagggtaatcgccctaagccttatttttttgaaatttcaactttagaaaaaagttcgagattactcgagcttttttatttaaaaacagtgttatagttttaaattcgtgaaactttgtgtaactttgattttgttaaaagttgataaattggtataatttatttagctgtaatataaaaatgatgaaagcgatacctgatttttttgggaaatacaaaaattaaatttattcacagctattattagccaaaaatcagttggattattattaaaggtgaaaaaatggaagcaatttttttagaaccatattttagaactaaactttggggtggtagaaaattagaaacactctttaattatcaaattcctgatggaaaagtaggagaagcttggattatttctggctatcgtgatgatgcgtcacatgttattaatggaaagtttaaaggtatgagcttgcgggatctgtatcaaaaacatcctgaattatttgctaatccagaagaacaggaatttccattattagttaagtacttggatgctaatgataacttatctgttcaagtacaccctgatgacgaatatgctgcaattcatgaaaatgattcgggcaaaactgaatcttggtatgttttacaagcagatccaggttcttatttgatttatgggcatcatgcgaagtcacgtcaagaattagctgatatgattcatgagggacgctgggacgacttgctccgcaaagttcctgttaagaagggggactttttctacgtacctgctggaacaattcatgccctaactaaagggattgttgtaattgaaactcagcagtcaagtgatgtgacttatcgcttgtacgattatgatcgagtagataaagcaactggccaaaagcgtgaacttcatactcaaaagtcaattgatgtcacaactgttcctcataaaaatccccaattagatatcaggaaagaaaaatgtggggatgcgacaataactatgcttttgaataagccagtttctcctcatttttatcttgcaaaaattgaccttgatggcgaagtcaagtttactatgaactggccatatcaactgttttcagttatttctggttcaggtaagctttgcttacctgataaggagtatgatttaaagcttggtgacaactttatcttgccagctggtagttatgatttcacattttcaggaaagattagtatgattacctcagcacctataaaagaataaaggatgaagtaatatgatttatgttgcctgtggaataattatgatgattgttggctttctttggtatgtagctccagcgcggcggcctgaccgtttatatggatatatttcatatctagcccaaactaataaagatagtttccaatttgcgcaaaaaatgggagctaggtataattttcttgttggcttagtccaatttttacttggactagcaatacatttcttaggcggagataagtattttatagtttggctgttaacttttgtaatttttattattattccttttgcactaactgaaaaaagtttacagaagtttttgcaaagtaggcatgaattgccacatgattacgtcaaacctgatgatattaaacgccaaaaagttaaaggatttagggatttataatggaattaaatattttaatggtggaagatgattcatcggttgctgaaatgatggagttattctttaaaaaagaacaatggaatgttgacatagctcgtgatggagtagaggcagttgataagtttaaagaacgtccagattattatgacatgattacgcttgacttgaatttacctaaaaaagatgggattcaagtcgctaaagaagttcgcgctatctctgaaagtattccaatcatcatgcttacagcccgggatagtgaatcagatcaagttttaggactagaaattggggctgataactatgttactaagccatttagtccaattgcattgattgcaagaattaaagccttgcatagacgggcagcgctagaaaatactgataacgatcgcaaggctaaaggtgactttgatattgtaactaatactttgaagatttctaagattcgaagagaagtttacttcttagataagcaaatcgatggattaacaccaaaagaatttgatttactttatacaatggcccaaaagcctaagcaagtattttcaagagataagttgcttgagctagtatggggctatgaatattatggagaagaaagaactgttgatgcacatatcaagaagttacgtcaaaaattagaagaagtggggccacaaattattcagactgtttggggagtcgggtataaatttgatgactcacaggtgaacaaatgaagttaatttatcaacacatgcttgcttttttggtcattattttgacctcaacagcaattgttggtttttccgtaataagtttttcttcgaatcaagcgtatcagactacttatcagcgccttgaaggatatgctagttctttaggagaactggctacagaacaaaatcctgatcatacaagtaaaggagatttaattgataatcatttcttaaataagttacagattgtgatgcagtctgatgatttgcaaattcgactttttaatggtaaaaataagcaactttatccaaaaatgggtccgaaagttaagttacctaaagacatttggaaaagcttaaaagcgggtaatgaaattcggataaagaatgatcatgaacaaagagaaacttatttttcaagtaaggatgcatatactagtgtaattatcccttggtttgatggtagcaagatgataggtgccgtgtggataggtgcccgtgtaaaaaatgttgaacagccaatacatcttgctaaacgaaatctgattagtgctttcgttgtaacactaatcgttggcttaattctgagttatttgatttcttattatagtttggtcaagataaagcgcttatcaaaagcaactaagaaagttgctgctggtgatttaactgtacagattcatcaccaagatcatgatgaaatagatgatttggcaagtgatttcaattcaatgattaagtctttgaagaagtcagctgaagcagtaaaggaacaagaacggcgacgtgatcaatttatggctgatgcggctcacgaaatgcggacaccattaacaacgattaatggtattttggaaggtttagagtatgatgcaattcctgaggattctaagcctaagtcatatcagttaatgcaccgtgaaactaaccgtttgattagattagttaatgaaaatctagactatgaaaagattagaaataatcagattagcttaattaaaaccaatttcgatgcaactgtcccgttgaatgacttaaagactcagcttaagactaatgctgaaaaagaaaatgatattattaaacttgaagttcctgaaaaactgccagtttatgcagatcatgatcgatttactcaaattatggttaatttagtccaaaatgctattcaatttactcaaaatggagttattacagttagtgctcgacgattgaaacatggtacagaaatttcggttaacgatactggtattgggatgagtgatgaacaaattaagtatatttttgagcgtttctataaagcagatccttcaagagcaaaattaggtggaaaaggtgaatcaggtttaggattagcgattgttctttcacttattaaacaacatggtggtaggatttcagtaaattcgattcccaatgttggttccacatttatagttacattttttgataaaggttttgaagaatataccaatgaagattagttgtaaaagttttagtttatcagtctatacgattgatgctaaagcttttttatttttaacattaacttttgcattaacttgagtcaaaaaagatattttatattataaatattgaataatatgatttttaataagttttgtagttttttaaatttaaattgatttgtatattttgattaaactatttaaatagcaaaaaactaacaatatattctatttttatttgcgttagaaattgatattatgtaagcataaaagcaaatgattctattaattttaataaagcaatatatataatttatcaaaaaacacatcagtcaatttagtttttgatgcgcttttttgtatttgtaagttattagggggatatacaatgctttcaaaaaataataagaagcaatacaatttaaaacattcgaatgggcagcaacacttttcattcagaaagactacggtgggtttagcttcagtattactttctaccactttatatttgggagttaatagtggttttgtagtacaagcagcagataactcgataacagtgggatcaacttctaatgataaatcagaagttgataagagtattttgcaatcggcatatgataacgcaattaatatccaaaaaacagatgttaagtatataaatgaaactgatataagtaaaaagaatacgtatgatgatgcaattaataatgcaaaaactgttattgaaaatgaatctgcaactagtgaagatgtaactaacgcaagtcaaaaattgttagctgcctataatgcactaactggtattaatgaaaatacaaataagacccaaactttaaattcatcttcaattgaaaataatactttatctagtaatgcattggagacttcacttgcaagcactactttagagcaaaataatcaaattaacccagattataatggtgattttgattctgaaggtatgcactttgagtctttaccagactataagatttcatatactcaagatgaatataatcaatacactcatccaacaggatggcaaactatttataatgaagatggtacagtatatggtattgtttatcgttataaaatgccaaaaaatgacgaagaagctgaagctgaaggcttaagtcaaaagttaaatgtctatgatttagtacaacagattattgttactgatcctaagactggtgctaaatataagggagttgcacgtgtagatcctgccactactgaaaataataaattaatttatgtagatggaaccgaaccagatgctgatggacgttataaacgtaatggacattatgttaacgttttaagtattagtggtaatcgtgatggtagtttggatcaagctcaggatgtaacgtatgatactagagaaagttatgataataacttctacccagatcaaaaagaatggacagttgcaaacgatcctaaagatcatacaaaacagccttctgattacgcagatgatgagtatggcaatggaaattatttaaaacttagccagttcgaaaattattctaaatcaggtagttcaaatgaaccacgtggagatatctatgttggtggaaatgtacaaattgttaattccaatactaatgaatactatttagcattaggtgttactacgcttaaaagtgctattgataaaaaaggctttgacaatagtgtaatgagatatattttgccaatttatttccttggaactaatggcgaagcagctcctgcacaggaaaccaataaggacgaactacaaaaggcagtagaagaaaagccagcagtagaaaagaccgccagctacgaaaatgcgagtgaagatgcgaagaaggcatacgatgacgcagtagcagaaggtcaaaaggtcttagacgatgcgaatgccagtcaaacagcagtagatgaggccaaagcagcaattgacaaggctaaggcagagttggatggtaaggaaaccaataaggacgaactacaaaaggcagtagaagaaaagccagcagtagaaaagaccgccagctacgaaaatgcgagtgaagatgcgaagaaggcatacgatgacgcagtagcagaaggtcaaaaggtcttagacgatgcgaatgccagtcaaacagcagtagatgaggccaaagcagcaattgacaaggctaaggcagagttggatggtaaggaaaccaataaggacgaactacaaaaggcagtagaagaaaagccagcagtagaaaagaccgccagctacgaaaatgcgagtgaagatgcgaagaaggcatacgatgacgcagtagcagaaggtcaaaaggtcttagacgatgcgaatgccagtcaaacagcagtagatgaggccaaagcagcaattgacaaggctaaggcagagttggatggtaaggaaaccaataaggacgaactacaaaaggcagtagaagaaaagccagcagtagaaaagaccgccagctacgaaaatgcgagtgaagatgcgaagaaggcatacgatgacgcagtagcagaaggtcaaaaggtcttagacgatgcgaatgccagtcaaacagcagtagatgaggccaaagcagcaattgacaaggctaaggcagagttggatggtaaggaaaccaataaggacgaactacaaaaggcagtagaagaaaagccagcagtagaaaagaccgccagctacgaaaatgcgagtgaagatgcgaagaaggcatacgatgacgcagtagcagaaggtcaaaaggtcttagacgatgcgaatgccagtcaaacagcagtagatgaggccaaagcagcaattgacaaggctaaggcagagttggatggtaaggaaacccaattagacgaaatactgaatttatttgataagactttagtagaagatttaaataatttaacagatgaagaaaagaatcaagtagaagcaaatattaggaatgcaaattcaaacaagcctatttcttcgatagttgttaaggataacggccaaactattgttaacttcgaaaatggagcacaaaaggaattaactccagatcaaactatcattaaaaaagaagtaactaatactgaaaagaaaacagaacaaacaacacctgtaaatgagagttcagtaaataaagatgctttgaagaatgaaattaataataaagatcaaataaagtcgtcaactgtatacactaatgcaagttcttcaactaagaaagcatatgacgatgcattagaaaaagcacaagcagttttagctgataagaatgcaagtcaagcagatgttgatactgcattagctaacttgaattcagcaagtcaaaaacttgatggaaaagattctccagagacttcaagtacaacgaaaaatagtattaatgctaagaagttaccacaaactggttcgcaaaatgaaacaacacgtggttggggattaagtctgcttgcattagcattagtaatgcttggttttggtaaaaagcgtaagaagaactagcaaattgtaagaggatgtacaatctaaatttcttttaaaaattttgaagtaataactgaaaatgtccaagtaatttataaattacttggacatttttgcttaaacattgctttattgaatatctactaatactatagtatgttttataaacaaataacttttcaagtattgaataatttgttagtatgttatttggatttttgggaggatttatcgatttgcatttaagtatagataaattttctctaatttaaaaattaatatatttggattcgtaataataaattcagagtcgaattagtagatgctaaagagactcttcttttatttatattagggggttattaatgttttcgaaaaataatagaaagcagtatgaactaaaaactgctaatggacaacagcatttttcattaagaaagactacattaggattagcttcagtgctactttctactactttgtatcttggtggaagtaactctttagtgcaggcagctagtgacacagctacgaatactgagagccagactgctacttcccaatcaatcgaaaataacaatgaagaaaaagttgataagagtcaattacaatcagcttatgacaatgcacttaatgttcaaaagtcagataaatatactaatgaaacagatgcaagtaagaagtctgcatttgatagtgctgttgcaaatgcaaagaaggttttagataatgcttcagcaactagtgaagatgtaaagaatacgattagtaatttggaaagtgcagctagtcaattaactggtactagccaaactaatgaagctgtaaacactacagaaactaagacaagtacaaatgatacagatacaagtgcagctatgacaactacaactttgaatgtatcttcactttcaaagaatagtattttatctaacaatgcattaactacttcattggtagcagataccagtaatcaaactgtaaaggccactaatccaggatattctggttcatatgattcaggcaatattcatattgaagatttgcctaacttcaagatttcatttactcaggataattataatggcaatactggttggcaggtaatttacaatcaagatggaactatcaatgcggttgtttaccgttatgaaataggaaaggttacatctttaaattcttctgatttagctaagcaaatagttctttatgatcctaagacacaatatcaatatactattgattcaaaactaaacgcacaccaagatggtagagatggtgcacaacgttgcgttcagaattcaaatagtagacaatacaccaattttatggatgtattgctctataaaccggatcggaatgaatactggggattgcagccagtagatattgtaactaagaattccaacaatacttatggctctttaaaacttgatgattatactaagtatgctgaaagtgctacgtcagatactaaacgtgagccaattacacttgatggcaaaaatatcgttaataattcatatgctgaaaattacattatattaagtacaaataatggtacatatgtagttaattatctaaaagatgatgcgtttaaatacatgattcctctttactacgttggagttgatactattgcaccaacagtaaataaggatgatgcagtatctaaggttggcggaaccactaaaagtagtattgtatatgtaaatagcaaggatgctttagatccaaataaaggaaactgtcaaattttttgtgtaaatagatctttctcgtaaattgtttttttaacgttttatttattcaaaataggattctaaggtatcctggacttgaccaaagcctttgtgaattcggttgaagtagcggtcattgtagctcattgcttggatgccaataaaagtatcaagcgactgttcagtcgggaactccgctttaggcttagccttgcgcttaatgacgttattaaaggattcgatcatgttggtagagtaaattgaagccctgatctgcttaggataattataaaaaacaagcaggtctggctcgatgtctttcaggtttctaatgacacgattgtagctcttgttccatttggcataaaaagcatgcaatacatcaacagcagccgctttattggcttgctggtgaatctgcttgaattcgttcatgattgcctcgcgatcgtccacgcgtactttagcgcagatgttgcgcataacatggaccaagcagcgttggaaatgagcttgaggataggtctttgccagtgctgctttcatgccgacaacgccatctgaaaggaaaagctctacttgctttaaaccacgagatttcatgttctggagcaacgccgtccagacttcaatattctcactaggcgcaatgcagtagtcgataacttccttgtgaccattaggcttgatgccaatggcaatatatactgcttctcgttcaaaagtttctcgacgcaacggtatatacgttgtatcaagataaacacaaaagaacttatcgctcagcttacgcttgtgataagcctcaactttaggaatcatttgcttagagatattagacacttgagctggactataatgactgccatacattttttcgatcaaattagctatttctctagtggttacacctttagaataaagctttataaccatatcttctaagagatcagtatgttgtttatagtctggcagagtgtgttgatgaaacataccattgcgatctcgtggcacttgtacctcaattgatccaaactgggtatcaattttacggaaatacgcaccatttctagaattaccagtattccagccatttctagcatagggatcatatcttaaaaaggcagtcagttcagattctaacatgtcattaacagcttgttggatttcatgacgaagcaaatcattaattttatcttgattgaatagagcttgagttatatttttggtaaaatcattcatgaaggagttcttctttctgtatgttttttttgttcaaaccaatcatacgagaaaggaactcctttttctaatgttttaggaaattaaattaaggaataattcatccttacacaaactattttacggtctcaaataaagtaatttctgcaactgataatggaactccagacgcagatttaattaaaactattgaattaaagggtgaagatggttctgatataactaatatttctgatattaagaatgaagtagcctacactgtaacttatacagttactgataaagcaggaaatagttcaagttttaccttagacaagaaatatgttgttggaactaaagttgcacctatcgttaattcagacactatcactgtgaaaaaaggtgatcaacttactggtgattctgttgcgcaaatggtttactccaattacgctactttaaaagatcaacaacaaagttttaatttccaatttactgatggtggaagtactgaaaaggctggtcaatacaaaggtcaaatttctactggtggtataactactgaccttactattaacgtagatgatccagaattagaccaagctaaaaaggatgctcttcacgcaatcgatcaaatgaagaatttgaacgatgcacaaaaacaagcagctattaatgcagttaataatgcaactattgcttctgaagcaaaaactgcccaaactaacgctgaaactacaaacaacaatatgggttcattgaagtcagatgataatttgactaacccaattgatgaaaatagttcaaccttccaaaatgcagataagaccgctcaagataattataagaaggccttatcagacgctcaacaattaactgatattagtaagggtacaagtgaaggcgcaagcagtgatccacaacatgtttaagatattaaagatgcattagataaggcaactcaggcattaaaggatagttctgctttgaatgatgctaagcaagctgccaaggatgccatcgataagatggaagacttatcagacgcagataaaacagcagctaaggcatatgtcgataaggcaactgatatttcaggtgtaaatactgctaagacagatgctcaaaacttgaacgatgcgaagaaagcagctaaggatgccatcgataagatggaagatttatcagacgcagataaaacagcagctaaggcaaatgtcgataaggcaactgatatttcaggtgtaaacactgctaagacagatgctcaaaacttgaacgatgcgaagaaagcagctaaggatgccatcgataagatggaagatttatcagacgcagataaaacagcagccaaggcaaatgtcgataaggcaactgatatttcaggagtagacactgctaagacagatgcccaaaacttgaacgatgcgaagaaagcagctaaggatgccatcgataagatggaagatttgtcagacgcagataaagaagcagctaagacaaatgtcgacaaagcaactgatatttcaggagtagacactgctaagacagatgctcaaaacttgaacgatgctaagaaggcagctaaggatgccatcgataagatggaagatttgtcagacgcagataaagaagcagctaagacaaatgtcgacaaagcaactgatatttcaggagtagacactgctaagacagatgctcaaaacttgaacgatgctaagaaggcagctaaggatgccatcgataagatggaagatttgtcagacgcagataaagaagcagctaagacaaatgtcgacaaagcaactgatatttcaggagtagacactgctaagacagatgctcaaaacttgaacgatgctaagaaggcagctaaggatgccatcgataagatggaagatttgtcagacgcagataaagaagcagctaagacaaatgtcgacaaagcaactgatatttcaggagtagacactgctaagacagatgctcaaaacttgaacgatgctaagaaggcagctaaggatgccatcgataagatggaagatttgtcagacgcagataaagaagcagctaagacaaatgtcgacaaagcaactgatatttcaggagtagacactgctaagacagatgctcaaaacttgaacgatgctaagaaggcagctaaggatgccatcgataagatggaagacttatcagacgcagataaaacagcagctaaggcaaatgtcgataaggcaactgatatttcaggtgtaaacactgctaagacagatgctcaaaacttgaacgatgctaagaaggcagctaaggatgccatcgataagatggaagacttatcagacgcagataaaacagcagctaaggcaaatgtcgataaagcaactgatatttcaggtgtagacactgctaagacagatgcccaaaacttgaacgatgctaaaaaggcagccaagaaagccatcaatgaaatgggcaatttgaataatgctcaaaaggatactgctttaaaggccgttgtaaatgcaactccagaatcagctgtagtaaaggtacaaaacactgcccaaactactgatgataatatgagtgacttgtcaactgatgctaacttcaagaatgcagacgatattaagaacagtagtaattatgtaaatgcagataaaaatttgaaggatgcttacgacaaagcagtagaaaatgccaaggctttgttagataaaatcaatggttcaagtactggtgatgtttcaactgaatcagcagtagtaaaagctgctaagcaagcggtagatgaagccttaaacgctttgaatggtgatagcaatttaagcaaggcaaaagaagctgctaaatctgcaattgatggtatgagtaatttatcagacgcagataaaacagcagctaaggcaaatgtcgataaagcaactaatatttcaggtgtaaacactgctaagacagatgcccaaaacttgaacgatgctaagaaggctgctaaggatgccattgatgaaatgggcaatttgaacaaagcccaaaagcaagcagctattgatgcagtaaacaatgctcaaaccaaggacgcaatccaaccaatcgttgacaacgcaactaacttggatggcaagatgggtgacttgaagaaggctattgaagaagccaacgcaaagaagtcaactactgcctacactcaagcaagtgatactaaggactttgacaaggcattaaatgatgcagatacattgaactcagataatggagacaatgaagacgcggatgcagtgcaaaagaagattgatgccttaaacaacgctaagttagatggtgaagaccaattagctaacgctaaaaaggatgccatcgatgcaattaacaagttaaacaacttgaacaaggctcaaaagcaagcagctattgatgcagtaaacaatgctcaaaccaaggatgcaatccagccaatcgttgacaacgcaactaacttggacggcaagatgggtgacttgaagaaggctattgaagaagccaacgcaaagaagtcaactactgcctacactcaagcaagtgatactaaggactttgacaaggcattaaatgatgccaacacattgaactcagacaatggtgacaatgaagacgcagatgcagttcaaaagaagattgatgccttaaacaacgctaagcttgatggtgaaaaggttgcacttcaaaaagctatcgaacaagcaaatgctaaaattgatggaacaaatcctgattatgtttactacaattcagattcagaatcacagtcagcattaaaggatgctgttgcaaaggctaagactttacttgaacaacgagatgcaagtgatgatgatttcaaggttgctagagaagcaattgaaacagctatcaaggcacttaatggacaacttactgataagtctgccttgcaaaaagcagcttcacaaagtaatgatgttcataaatctgttgtcttcctcaatgcaagtgaagcagctaagaaggcgtatgaagatgcattagctaatgcacaaactgtattggctgacgaaaatgctagtcaagaagatgttgatgctgcattagctaagttgaatgcagcactcaacaagcttgatggtaaagaagctcctgcaaaaccaactgttaagaaaaatacagtaaaacttggcactaatgctgatcgattacctcaaactggttcgcacaaatctgttgcaagtgaacttggtttaggaattcttgcattaggtttaacagcattaggtttggctaagaaacgcaaggaagattaattctcttcgtacttttaattaaatcctcagttttggatatttctccaaactggggatttttattacataaatattcttaaaaaacgatgttcaactgttcacatatgaattggactgttttaaaataattaaatgtattattacctgttggtgataattttgacaaaaggaagtatttaaataatgacaaaaaaatttacgccaattttgcttggtagtgatattaatgtatacggaatggcccgttcatttcatgaagcttatggtattaaggttgaagcttgggcaggcagccctttagctgctactaaatattctaaaattgttgatgttaaattatatcctggctttagcgaagatcctgaattcatgaatgtcatgaaaaagaagattgaagaatataagagacatgatgaacctgttattttaattgcctgtggtgacggatatgctgaacttttggctaaacataaagctgaactttcagaagctttcattgtgccttatattgagtatgaccttttgaagaagttgatttctaaggaaggcttctatgaatatgctgaaaaatatggtttaccttatccaggtactaagattattacaatagatgaatataaggctggcaattacttaacaatgccatttaattatcctgttgaattgaaaccagaagatcctgtttcctggcttgattgtcaatttgaaggtcgtaagaagacttttactttgaaatcagaagctgaattaaaagatattgtaactaagatttatactcatggttacaaggctgacttgattttacaagatttcattccaggtgatgactcacatatgcgtgtccttaatgcttatgttgataagcatcataaggtaaaaatgatgtgcttgggtcatcctttacttgaagatccaactccacagtctattggtaactacatggcaattttgccagaatacaatcaagatttgtatgatcaagttcaaagcttccttgaaaagattaattatactggtatggctaattttgacattaaatatgatgaacgtgatggtaagtttaagttttttgaaataaacttgcgtcaaggtcgttcaagtttttatgtaactatgaataattgtaatttagctaagtggtatgttgatgactatgtagaagacgacttgactaatcgtgaaactgtatatgctaataaggatggcaaggaccatgtattgtggttaggagtgcctaagaagatttttactgaatatgcagttgacaatgaagctaagcgcgaagcaagtagcttgataaaagcgggtaagtatggcactactgtattttatgagcatgatcgttcatttataagattgttgttgatgaagtatatgttccataactacgttggccgtttcaagaagtattttgaagttaataaaggtcaatactttgagaagaagtagtttataactaaaaaaggataagtacatttataatgtacttatcctttttgtttacttgtgacttgaagaggattgattactaggacttgttacactagaactagttgaactggcagagccagaaatattttctggaattgtagttatctcgttagtgcggtctttaagttctggtgcatcagtttgatagagattagttgttgttcctttatgttgactatatagtgaagtagatgcctttcctagcttctctcgcaaattaatcatttgctgaaattcagttatgtagttaaattgggttggagtagcagggataaagccttttggtgtgtaaaaacgtagtaagtttcggttattcagcgtatcagaataatgtaaactttctctttcatattttactaatttttgtaattccttcttttgtttgatagtaaaggatttaatcagctcacccgtttttgtattatagacatttccgttgcttgctttaccgttaataatagtatatttaggcgttacaattgtaccattacggaagacgacaatttgtttgtgatacttacttaacatatcagtaccaaattgaatataatttttgttatttactccaagtaagtgaagaattgtcggtaaaacatctatttcgcctgcatattcttgctttacactgcccttcaagccatccatgtgaatcataaatggaactttttggaattgagctgtatcataactagaccagtcactagttttccctaaaatactagaaatagcattgtagtcggaactagataatccatagtgatccccgtagatgataatcatagagtttttgtagagacctgatttttttagataatcgaaaaattcttttaaagcagagtcaagataatgtgcagttaagaaatagccattaacagttgcatcgctggtatttgttgttttaaaatcaggatctttatcttcatcatctaaatcaaaaggaatatggttggtgacggtaataaacttagtatagaaaggttgttgcatttgttctaaatacttgatactttctgcaaataaaagtttatctttaattccgtaaccacttgaatcatctttattatttgaatagtaatttttgtagaagaagtaattataacccagatttttgtaaacatcatttctattccagaaagttgcaatgtttccgtggaagacagcagatgtgtagccactttgtcgtaaaatctgtggagctgcttggaaggtattattagaacctaagctagtaaataatgaaccatcagaaataccataagttccagtttcaagcatgttttcagcatcacttgttcgacctaggccaacttgattatagaagttttcatatgaaagagtgttcttatctttataaagtgaatttaaaaacggggtaacttctttaccattgatttttagattaattagaaattgttggaagctttcaaggtggatgatgataacatttttccctttagatttgccaaaatattgaatattaggactggcataattctttttagtgaatgctaatattttatttaattcttctgcattggctactttagagttagtgccagattgtaaagacttaatactgtcataagctgtatagctagtaatgcctagatatttaacaacataaacgcgatcaaatgtatttcttaaaagtcgaggccggctagtttctgacaagaaaaagttgagccccaataaaaaacaggagaaactagtaacagcaaaggaactagagaaactgtattttttttgatcgattttgatgattttgaagattaataacaagataattactatcaagtctaaccaaataaaaatatcatcaaaatgaagtaaagaaacggcacttttaccaagaccttgagatactttactagtgttggcaatagtcttaacggttaaaaagtccgtaaattgacgatagtaaataacattagcaaaaagtagagcagtattaacaaaatcaattactagcatcgttacataagaagcaattggctttttaatgtataaggccaagcttagtaataatatgctagtagcaatcggactggtccacattataaagtgctggtaggggtcacttaaacccaagttaaagtcaacatatccagcaaagatatatttaattgtatataggattgttagaagagctaaaaagccagttcttttttgaatccaggtgaaattaaaatgttgaattttcctcacgatagatactccttaatagctaatattttaaatgtttcagcttaattcgacaatcttttgtaactttcttaagaattagacagaaagtttatatgtataatggtagtgatagagaagaaaggactaatgaatgatgatttttttaggacccttatacagctttttggcgaaacatttagctaccaatattaatcattttgccctggtaaaacttgtcataattagtttagataaaacaatcttttattttttgctttttgcttttttacgtttgctttggcttttgttgattagaagaaggcgaagtcacttatcagaaagtttagtttgggtatttacattttatgtgatgtttttactagcagtgactacatttcgtgaaagttatttcccttggcaactaacctttgattggaatcggcctttaagcgatattaatttgatcttttttaaggaaacttggaaattaactaaagggacaacattatttgacttcgtctacaatgctttcggaaatattttgtgttttataccttttggtttcttatttccaaatttaatcaaaaagaaaaaatgcatcttgcagacagtctttgcagggatggtgttatcactttttatcgagactatgcaatttggcctaaatactggagtaagtgatattgatgatgtcttttttaatactattggagctatttttggatatttagtatatatttttataaaaaaagttacgtattcaaaaaacttgtagtagttttcacaaactaagattgttaaaatagaagtgttagtaaaattttataaaaaggaagttacgagatatgagtttagttcattttgattcaagtaaattagctccttttgttcacgacaatgaattaaaagaaatgcaagctatggttaatgccgcagattcagaacttcgtcaaggtacaggtgctggtagcgactttagaggttggttagacctaccagttaattatgacaaggacgaatttgcccgtattaaaaaggctgctaagaagattcaatcagattctgaagttttaatcggaattggtatcggtggttcataccttggtgcccaagctgctattgaattcttgaatagcgcattttatggtaaagaagacaatggttatccaactgtagtattctgtggtaattcaatttcaggttcataccttgctgatttaattaattggttaggtgacaaggactttagtattaatgttatttctaagtctggtactactactgaaccatcaatcgcattcagaattttgaaggctaagttaattgaaaagtacggtaaagaagaagctaataagcgtatctacgcaactactgaccgtgctaagggtgctcttaagactgaagcagatgctgaaggttacgaagaatttgttgtaccagatgacttaggtggtcgtttcagcgttttaagtgctgttggtttattaccaattgctgttgctggtggcgacatcgacaagttaatggaaggtgctgctaaagctcgtgaagattacactgatacagatgtaactaaggattcaccataccaatacgctgcacttcgtaacattttatacagaaaaggttacactactgaattacttgaaaactatgaaccaactttgagaatgtttggtgaatggtggaagcaattaatgggtgaatcagaaggtaaggaccaaaagggtatttacccatcaagtgctaacttctcaactgacttacactcacttggtcaatacatccaagaaggtcgtcgtaacttaatggaaactgttgttagagttgaaaacccacgttttgatgtagagattcctagtgatagtgaaaaccttgaccaacttaacttcttagctggtaagaccatgaattatgtaaatgaccgtgcttatgaaggtgttgttttagctcatactgacggtggcgtaccagttatgactgttaacattccagatcaaaaggaattaactttaggttaccttatctacttcttcgaattagctgtaggtatttcaggttacttaaacggtattaacccattcaaccaaccaggtgttgaagcatacaagcgtaacatgtttggtcttttgaacaaacctggttatgaagatttgcacgacgacttaactaagcgtctttaatttgttagaataattttaatctgagtcggtaatattatattactttgagtaggagctatgcttctactcttttttattggaaaaggggtattttgtgaacacacagagaaaaaatatgactgcaattttgatggtggccgtcttagcttttttagggatattaacggaaacaagtttaaatgtaacttttccggaaatgatgaaagactttaaagttagtcttgatacaattcaatggacgacaactggttatttattagcaattgctattttaatgatttcatcttcgtatttaaataaacgttttacagcgagagctattttcttatttgcaagtggtagcttcttaattggttctttattgtgtttatttagtagtaattttgaaattatgcttttagggcggattatttcaagctgtggtgcgggcttggcgacacctttaatgtttaatttggtaacagaattaatgccacgagagaagattggcttttatatgggcttagctggcttggttttagcaatggcaccaagtttagggccaagctttggcggaattattgcatattatttcaactggcgagtaatcttttcaatttcaagcgttttagcaattattgtaattttaattggactacgagttgtagggaaatatcatgaagttagtcatcctagtttcgattgggtgcgttacattgtcattagcttgtttatggttgattttacacttatgattaatcacttaagtagtggatttgatcttcaattttttctatatttagtttttgctattttaagtatgggactatttattcatttatctaaaaatagtcaaaagactttgataaacctggcaatttttaaagatgcggcctttgtatatgcaatgttggcctttttcttaattcaattcatcaatattggagttagctttgtcttgcctaattatgttcaaattgtaaatggagcttcaactttagctgggggattaatgttattacctggtagcgtgattttttccttaatgacgccttattttggccatttatatgatgaaaagggtgcaaaattgccactttatttaggtggaagcttattacttgtggcgattattttacttgcattatttgggatggtgctgaatccatggataatttgcttaatttacagcataatggcttgtggaatgagaatggcatttaataacactttgacagttggaattgaatctagccccaaaaaactacatgcagatgctactgcaatcatgcaaactggacaacaatttgctggttcaattgggacaagtgtcttagcaacaatcatttctttttcacaaagtacaagacatggaagtaaagcaatcctaatggcacagggatgtgaagtagcatttatctttgtgacttttattgctattttgattatgctttgttactggcaattgtttacaaaagtagacaaaaaatagaaattaaaaaacatgaaatcgctttctttaatgctaaactaacaatataatgtaggtatagagtacagagaggaagtatactcatggaaaataaaatgactcacagcgcaagcattataaatgctcgacttgcatggaaaatagtctgggtagtagtttatggtattaccgccttttatacatatctttcattcacagatatggcacatatgatgaaatggatgatgtatgcaatggcttggatggcaggagggatgcttgctgaggcaattgtgggtctggtataccattgctgcggtaaagatggcaatggatgtcattaatgtaaagtaacagctaaaaaaggtggccatttatttggccatcttttattttataaaaacaaaaaagcagaagctttgatgcttctgcctttttgttgcgcaattgttgcacaaagtgctgcccttatctcatgtcagcttctcacaagactgacacaacagcactagtgattgggatattcgggctcgaaccgaacttttttaatcattattagccattattagatatttaaaatgctgaaatatcaaagctttgttctttatcaattattagttgttataattttgttgcacattttgttgcacaattttttctagtttgtttgagattaaagtatcgcttttacgcttgtcctcatccagcatataagcatagatttttagagtaacgtttaaatctttatgtcctagtcttttacttatggcataccagtcaattccctgtgagtgaagtagagcaacatgacaatgccgaagtgagtggaacacaaaatcttttttggtgatcttagcttttttcatcaaattcctgagaactgaaccaacgttgttagttgctggtggaatttttaatcctacagaaccaaatataaaattgctaccattttgctttaattctagcataagtttaactagcgttggcgaaacaataattgttctgattgattggagattcttagtcggcccgttggttttagtgttctgattataagatttgttaattctgattgtgttagcttcggaatctaagtctgaccactgcaagcctgcaatttctccataacgtgctccagttagcagcgctgtaataatcatataagaagaagtgtattttggattacgagtagcaattgcaacagatagcaacttcttaatttccgctaatgataaatattgagttgctcgtgattgcttatcattgcctttgagttcaacaccgtctgtaaaatcacggctgatgatgccgtctctgatagcgtatcttatacatgctctgtatctgcgattaatcatctttaccgaatcaggagccaggtcgagcgtattcataaagcgctgataatcgattcgtttaatctttttaagtttttcaaatccaaagtaatcatataagcgttttgaatcttgaatgtatttcactaaagttgtgttacgaatcttatcttttttagtttcagtgtaccagtcctcgaagtactcagcaaaggaagggttggctttgatgtcatagccttttgctgattcaagttccagttgtgcagcatattcttgagcagtcctttttgttttaaatccagacttagatacctgctctaggacatagtcaactttgtaactaccgtcaggttgctgcactatctttttacgtctgcgggaatgacggacttgccatactttgccacgcttagttatatatgccattgtgaactcctttcgttataatttagttagaaagacgatattcaataaggggggattctgatgagttacacatttaaagatgtagctaaatggtttttagctaaaggtaacaaaaatatttcacctaagaagcttcaaaagcttgtatattatgcttatgcttggacattgacgcttttaaatgattcatcagatgatttggaaaacaaattgtttgaagatggaaagtttgaagcttggattcacggtccggcaattagaaagctttatgaaatgtatgctgattatggttttgaagatatccctgaaaaacctgaaaagccaaagttttctaaagatgttgaagatgttttagatcaagtttgggaagtatacggtgattatagtgctgaccaacttgaaagcattactcaccaagaagaaccatggcaaaaagcaaggaaaggtttttcacctcttcaaaattgcgataatatcatttctgataaagatatttttaattactatattcaaagagtaggataagtatgtttaagagtaaaaagaaaataaaaaatccacctaaacctaagcctattgctgattatgatattatgaaaaagctttatgaagaaaatagagaagcaatggatattttgaaatataaataatatttgagtcagcattcagctggctttttattttgcactaaaacaaaagccctccttggcggaaggcttttgtgattacttagatttatttgatgcttttttgttaatcatgtaatgccatacaaagaagccaacaccaatgataaatgctaaccagccccaaagcattaagtcttcgtaatcgtgagcattagtgattgcaaaaatccaagtgatgagcatcataattaatccagcaatgtcaccgccaagtttttcactttttctggttgctatgtaggtaatacctgttgctaagaaaagaattgctgctatgaagcctgcactaccaccagcatctgaggttttgttttcaaatgcatgacctacaccaacagcacatgattgtaccaaaatgattaccgcaaaaagaatttgcaaaataccaacaaccaactttgtaactttcataaaatcctccgtagaaagtaaaaattttcagcttttatagtcttcagtatttggactatttttttagcaaaatataaatatatagatataaaatctggcttttttataaatttatgattctaaaatcgacctgacgcttacagccacatggggttgtgcttgtggataacttagttgtgttaacgtttgtgttaagatttgtgttaatttaaattatcataaacgttaacacctatatatataaactataaagatagatagatgattaattaataaaaggtcatagccccaagttatccacagggtaatatttgatagctgattcaaagatataaattcaaaagatagagtttcaaatttaaatatcgattttagctaatttaagcggttaaatttgaatttaaattatcgctgagtataaatactcgttttagtcttaaaataaaaaatagagtgcttaaaatgcactattcgatataaaagatagatttatgtttgtgtgctaattcgttaactgcctctaatcgatttgaaggaattgagaatgcattagcgaattcaatagaatttgagaagtaaatctcttgttcttctgcaatttcgtacatcaagttaacactgtatttatccgcctgagcttctgcctgcaaggtactagaaggtgtgtagtagcagataccattatcaccgttaacgtaatgaccaagctcatgaccagcgataaaaggtagtttattagggtctgtatttgtgtttagtatgatttttctttggctagggatgcatctactaacaaaatcagctctcaaactttcaaggataaacccaacaccatagccaaaacctttgtttagtactttacgtaaagctaaatcataatccaaaagataacctcctgagtcactcgttgagtggcttatttgtttttctctaaaattgcacggatgatagccaagtcctcgggactaactggtttgccatcatagctaagaacatcagtagtttttaagtcgatagtgttagaagaattgtcttctccaccaattaagtattcagttgatacattaaaaaggctagagagtttttttaatgtatctattgatggctcatttctacctaattcccaaccagagatagttgttggtttaacatttagcatttttgctaattctttttgagttagatgatgttcattacgtaagtatttgattcttgatgagatattcataaactacacctctcaatcgttaaaaatgatttaatacacttaaagtatatcaattttatacaaaataactagaaaaattgataaaatgtgttgcaaatatattaatcgtgtactatactaaacgtgtacttcgatgaaaggagcaataaaaatggaatttacaattaaacaagctcgaaactattccagccggacacaagctgaaatggccaaagaactaggagtatcattaccaacctatcgagaatatgaacatggcaatatacagatgaaagttgaaacagctaagctcttcgctaaagttgttaatgttccatttgaaaatattattttttgcaattagactacacgatacgtatattagaggtgcaatatgaataacttacaagttttcaattttgaagatgcgagagtaaggactgtatcaattgacggcaagccttatttcgtaggcaaggatgttgccgaaattttaggatactcaaacggcagtcgagatattaatcgacatgttgataaagaagaccggcaaaactaccaaaacggtacttttgaatctccacgaggattgacggtaatcaacgaatcaggactatacagtttgattcttagtagcaaattgccaaccgccaagaaattcaagcgctgggtaacttccgaagtcctaccgacaatcagaaagcacggcgcatacatgaccgagcaaaaaatcgaagaagcactgcttaacccagatacgctgattacacttgctaagcaactcaaagcagaaaaggaacaacgcttgctagcacagaagcaagtcgaggaaatgacgcctaaagcactattccacgatgcagtagccaatgcagaaaacacaatgctggttagggatgtggcccacttcttaagacagaacggtgtagatattggcggtactcgcttctttgtctggctaagactaaacggcttcttgactaagaataaccaaccaacgcaattatcactggagcgtggatatttcaaggttaaggaaacagtggtacacacaaaccacgggttccaaacaaaaaccacgccaaagattacaggacgtggtcaaacattctttttgaagaagatgttaaaagagcaagaagaaaagagagcgatgggactatgaacaacaaaaaaacatcagatactttaaagttcctgatgaatttcgacttagtagtttgcagttattgttacaaaatcgtacccaatggtaattactgtgaacgatgtggcaaaaagttaattccggtacaagagcttgatgacagcctcagagcacacatcaacaaggaccctctaccaaattcaagaatgggtttcccgatggttttccatttaacagctgataactgagttcgaggggtttcaaccatcatatctggaattgtattttttaatacttcttttgaatttgaatttaaatcagaaagttgaattaactcagtcatagaattcattgaagcttgagtccaaggaaaaggattagaacaaaatttacaatatgccggaatttctttcggtcctgtataacccaaaacaatatcatcatattttctatttccttcgatgtatttatggcaattggggcattcttcaattgttttagcaccacatttttcacaaaatttaattatttgagattcattagctgttgctgagtcagtgattttatggccgtttaaacaaactaactgattgtaaataatcaaattaaaacacctcttttttagaaatattatatcgtatgccaaattaaaaaggaaaaggagaacatacatgaacgaattagaaagaagaattaaagcacttggtcaaatctataatttaaaccaattatccaaagaggattttatcagcgcaatatgtacttacattcaggcttatgccgattataacgatattgataaagagataattgcaacttacattttttcaattatgcaattatctaaatcagaaattagaagaatggttgaagaaattgaagaagaggactagctatggacttaatcaataaaaaaagcctgcaagaactaatcaaagcaactttcatggaaatgaagccacgccttgaggaagaacttacaggaagaacgattgatattgaccaatttagaaaagaatactgcggtgggaaatcagcaagctgggttagaacatttatctttgacgcattcccagaaaccaactacgaaaatggcggatggtgtatgttcccacatagaacagcaggagcaagaaagaccatcattctagtaaaacaagctagtgaatggatggagaagaaccgaagaaaaatcgattggagtaagcaggaggaaccaaaatgagaactttaaagaaatggaatagcttattacaaaaacacgctgatactaaaatcagcatcagcgtgtcaactcttatatatttcgcactattggcaatcggtatctggataatgtggtcattaggacccgacccactagtacattaaaaatattcgaaatcaaggagattataacatatgaatctatttgaaatcaattctgcaattgaaattattaagcaaaaagacctagatccagaagtattagctgatacgcttgaaagcttggaactagctagagatgagaagctggatagtgttgctaattggattgaaaacaatgaatcagatatgaactggataaccgacaagattagtcaattgcaagcagaaaagaagcgcttaacaaaacaaaatgaacgattaatgaagttcctgactaatcaaattgacgccacaggctataaggaattaagaactaagaaccataaattagcacctcggaattataaagacaaaacaataattgagtcgaagtacgatattccagctacttacattgagattacctatgaacctaaagttcacattgataagaatgcaatctatcgagctttgaaagctggaaagactgtaactggtgcaagattggaacctaacagaaagacgattatcaagtaggaggaagctatgttaattaaaacgattgatggattagaaccagcagataaaagtaagatgattgctgatttgttcactgactacaacaaggtcaaggctgtaatggctcagcctaagaagaataagaaggcatacaactacaattactcaccgctcgatgaagtcctgagagtaattgatacagcgattaaggattcaggaactaacctaagttacacatttgaaaccattactggagagggtaaagcaggcactaaggtttacatctttagcggaaacggagcatggcttgaatttgcagacgcactgcttcctgtaccgaagaacgatgcacaaggatatggctcagcattgacctatgctagacgctatgcaatcagttcagcatttggaatagctagtgaagaagacgatgatgcacagtcaattagtagtccagtaactagacgtaagacaaccagacaagctgcaccacaacgtcaacaacaaccagtaaaaaagccagttccagttattgacgataaaacactaaagaacgctgaaatcacttatgaaggcaagaaacaaagtttactggctgttgtcaaaattgcaatgactgggagtgctattgataagcagatggctggtgactatatcaagaagttggactctaagacacgtgaaatggcgaacgaaattgtgaaacggaaattatacgaacaaccagcttagccataaggaggagctatgaatagttatacgtattttgcaaatctcaagaaagttatggaaaccgaatcactagctcctcaagaattagcactgttacaagcgctgattatggttgctaataattgtggttggcaagaagaattgacccctagaaacgctatcctaatgacctatagtggattatctaatcgaatcagccttgctaaatggcgaaatagcttagttgagaaaggtttgattgagtttactgaacgcaagcggaatgcaggggtttataagttaggcaagaagttaactgccagttcagctaagacaaagaaagttgaaactaagccagttaaaagcaagccggaaaagaagcatgaaccagttgaagtgcaacaacgcaaggcacgcagagcgcaagagtggcgtaattttatgccactgtatctcccagtagatagattatctgtaattgaacgcaatgacctagaagcacactatatcgattttgtagatgaccattttgcagattcgacacgagcgtcgcttgctgcagttgattgggaagagattgagagtccaggtaagtacattagagctgtaattaggaacaagcaggtagtagagcagatgaaattgaggaattttaaggagaaattgaaattatgattaatagaactgtactagttggtcgtttgactaaagacccagatttaagagttacgtcaagtggtctatcagttgctacttttacgctagcagttgatagaaagttcggcagtgataagaatggcgctgattttattagctgtgtagcctggagaaaagcaggcgagctaatttcccagtacacacataaaggcagcccacttgcaattgatggtcgacttcaaactagaacttatgacgataaagatggtaagcgagtttatgtaacagaagttattgttgataactttacattgcttggcagtaaatcagataaccaaagtcaaggaccagctccagcaactaccaatcaaccaccagttccaacgcaaacctcaactaatacacaagatccatttgctgatgttggcaatgcacttgatattagtgcagatgacttaccgttttaggtgattactatgcaaaagacaacagtaaagttaattaagctaggtgctagtaaagaagcagatgaggtcaaagaatttagatcatcccttgaagccaattacttcttaggacgtcctaaagattatctctggcacagattgtcaagaaggcacagcttagtatccagtgtagataatacgatatattttgtagctcaatatggacgcagtaaataccatctcgatgaaaagttaatcaacagaggtaacctcactgatgatttcaatgtgatgccacttggtagagaagtcattatccagtatagaaaagaaccacggcaaagtagaaagttgaagctaagtgaacgcttagcaattatagctaagttagaagctgaatttggtagtttatcggcagtaccggaagataacccgttgcttgttatgcttagagaaaagattgatacagaagaaaagaatcaatactttgaagtaaaggttgaagataaggctaagtatataaaaaagaaacctgctgcattagtagaaaaggcagaaagcttattgaagtatggtgtttctccaagagaaatttcagaaaagttaaatgtaagagcagcatgggtttataagattgcaaattcaaaaagcatccctattaggaaaatgtatgcttacaagttggtatcaaagcaacccagcaatccaagatttaatcgaccattatatgcttcttgcttagcggatatagctagatatttaggagtttcagcaactaatttatatcggaagctggataaattaggctacagcatggagtgtgttcaaaaatattttggcgatttaaaaaacggggaagactatatatgtgcagtaggagttagaacaaagggatatggagatcagtttttcgattgatggtaagccgtttggcaaggaaagaccacggcctaatcggaccggacacggtgtatacacaccagaaagaacaaagatgtacgaatacaaggttgctcaaagcgccagcctagcattctttgatgaaccattagatagcgatattagagtatgtatcagtgcctattttggagttgctaaaagtgattctaaaagaaaaaagcaggccaagatttctggggagattagacctgcaagaacaccagacgcagataacatcgctaaggcagtattagacggtatgaatggtgtggtttataaagatgacaaacaagtaattgaactcaaggtaactaagcaatatgcagaaaaaccaagggttgatgtaacgattgaggagatttagcagtgacagcatacgtaaacaagaatgaagagccaagattaaagagagtagtgagaattgactataaggatgattcttatggtaatcctaaaacaatctatactagccacttagatagtggatttcagccagcaagtatccaagactttgttaatcggtacaaggaccagaagttggtgtacataccaagcgcaaaggccatttcaattattaatccaggttttaaagttaaagaaagatatttgagtggcgaagaagaaccagttgcaattaatacagataacatttacatgattacttatgagaagctacctgaattttttagaaacactgaaatgtgtaaggaacttgtagaagtggctactaaatttactaagagtcaggcttacaaagaattaaaactttcaggctttaagatttatccagctgataacagcaacgatgaatgtactactttcatcatcgactttaacaaacttaagttagagtatcgctggggccaacttcttgtagagaaacactgtgctgaacagcttttcaaagaagagaagtaccagcatttatttgaacgtactaacacaggctattacctgcttcgagattggggaaattacggagataacacaaatgattgatccagaaaaaatcaaaagcttcctcaacagcttgactaaagaacaacttgaaaaaatgtatgaagcttttagtggcaaaaatagaaactcagtagcagaacatgaggaagtagatcctgaggaggaagcaaaacataaagagattagtttgcaagaattagcattgaatacatatgagagtcaattgctgagtgttgctatatgtgattacaaggtagttgatgtatacgatgacaaagacagctttactttggtttttgaacaaataaaaccacaagggacaactactacagtaaccgttcctagaagctgtggttatggcttaaataaagcagagtctgagaaagtattctcttacttgcaacgaatgaaaagctaaacactaatttgaagaggtaatgataatgccaattactggtaagcagttattaaaatatcttagatctaataatttagaatatgacttcctatgtgaaataagtgttgcagcaggaattgaagttagtgaagagcttaagcagaaaaaactacaagtgtttttattggatgattatgttaaaaaacatggtgaaaagcaatgtcaataggttttaaattagacggaaaactaatcaaagtacgaaagagtgatgggatgaaagatattgagaaattatgtaaagatgtgttcttaaaagaagtgggaaagaataatcatattgctagtgaagatatgaaactggttaataaatcaattgaccaatttgaatatgaagttggaaaaagaaaaattagcttgaaattctacagtgatagtaactcagtgagcgttgctgtagaaactaatggtaagccattaaatctaactggtgtaagtattagagcatatagtttgatgattattggtagtacgcaagcgtttgaattaccagtatacaattaggagttagatatgaaaaaattagctgcgtttctttttaaagcaacagctatgtatatcagtatgttgctactatttattagttttgcattgatggttgtttgggatagatttgatactttttatgttccagtcttatcactaattgtatttatagtggcttttttgaaattataaggttgaggtgttgattatgttacaggaggtagtttcattggattatgggatggatattgatacagagaaaactgcaagaattgtggaacgcttcctgacacatgatttggaacgttatcttagatatgcaggtaagcatagattagacttagcttcacctaaagcagatattacaggtatctctggctcaaatggtaatgcacaggagattaagctattacgtaatttagaagcacaggcgattgttaaggcggtagatttaacattattgaactgtagcaattcttcaagaactccagttcaaacaatattagttgagctatacgttaaagaaaaatcgaattgggctgttgctcaaatggttggatatagctccagcagattccgagaaattaagcgatacgctttgtgtgagtttgctgataggtttgaccattggcaagtagtagcaaaggttggtaagtttattgatttacactgttataaataaaatcggcgcttcatcggcgctttatcggcggtcagtcggcgattaatcatgataaagtagtattatcaaggaattgaagatgggccttgatgctaaatacgttttgttcatgtactcctccgctaaggaatagttcggtgctagtgcttagaagcggtgcaagtccgcttgccgaacatagctcgctattagactagtaactaatagtgagcttatcgtgttttaccttgcgatgacctactggaaagcgagcgagattaaacacaattttttcttggactcatagctctttttagctaactgagctgtggttcctcctcttgtagtgtgtccgctgagcgggtgattggcaggtttgattcctgcacatgctataacctgcgacgaccattagattgcccatttgatgcgagcgggtgctaggggttaaggagtacctagtaattcctaatattatttcatcaaacagagaagctacctggtttctctgtttttgtattgctataattaagtgaaatttagaactaactgctataattaaactatggaaggagatgcttttgtgttttggtcatctagaaaatcatttcgattgttttactacgtatcatcactacttcctgtttatttatttatgctaatttttatgattattataaaaattgaaaatcaaaaggcatttttatatcacgaaaagttatataaaatcatctttggtttatttatattttgtatttttgcttcagtatactgtcttttaaagactaaaagtattattaaacgtactacgcatttttcaaaaacttatggaacaacgaaggttattttaagtgataattataatattggatttagagaattcatattaagttttattttgccattaatatcaactttttctatagatgaatatcctatagcaacaattagtatgatatttttatttcaattattgatgtatatattttttattagttcatctgactttttccctaatattcctttagttttattaggcttttctgtttttgaagtaaagactaccaattctgaaaatagtaaattaaaatatgtttttggaaagacaaaaaatatagctgaaattatgaaagatgataaaagctatgaagttgtcgaaattggtgaaccaaattatttcaataatattggagtgatttgcgaatgatttttgaaaggatctttatgaatattaattgtgtccttatttttagtttaaaaaattgctataagttaaatttagacaatgatcaattgaatgatttatctgaaattatagaaaaaacatcagagtatggaatggtaaattttttagataataatattgttcaatcattaaacaatccaggtaagtattatatcagtgcagatgaaaatgataatatatatcaattagatatattgaaagaatatctttcgaaaattgatagagcaccagtattaagtgaattagaaagtatttatagttttgataacacgaacagtaaagataaaaatattaatcaaatattgataggatatttatttactgaaagtaacggtaataaagaattatttttatatcgattgaaaaaatcattactaataaaaaattctggtttttggatttttggtaaaaaaatttctagtacaaatgcagaaaaaattaaaattgatagaattaaaaacggctttaacttaccaacatcaaaaaaagattgtttagcaagtatttataaaagaaaagatacttccgaaggaaagcaatataaaataaagatatttaaggcatatgattttgatgaagtatttcaaacatgtgatactaagcacaaatatgttgatcgcatattagaaaaatttgaatccgcaaataatccaataagtttaactaaagaacaaattttagttaagtttaaaactgatgaacttccagaaattaagaattgtatttataatgatgataatttaaccaggacatttgcaagtttccatgataataaaaatagaattattaaaaatataagtttggaaaaacttaaacaggttttaaaagttttgaaattacacgttgaaaataatgcggatgctggtttcaatataaataacattccagtattgacaacagataataagctggaggtaacatcaaaatcaattccaacatttgctgctttattagataataaagttattcaaagattacttgataatacaatagaaataccatattttaaatcacattccgttaattaaaggaatattaagtcagcacacgctggctttttattttgctcaattttagaaaggagggctagtatggcgaaggcccagtacaagaagtggctagagcctgaaaacctagtccttcttacaggttggaaaagaaacggcctgactgatgaacagatagctcacaatatgggcattagggttggaacgttatacagatggaaaaatgaacatagtgagttaaatgaggccctaaaaaagggcagggaagtcacacggcttgaagtagagaataagctgtttgaacgagcgatgagtggtaatttgactgcaatcatattctggcttaagaacaattggagagataagtacaacgacagtcaattgtcgcttgaagaaagagaactcgctaaggttcgaatgaaaaagttacttgctgatactcgtattagtgaagcaaaggctaagattgctgagagggtaagtgatagtaagagtgagcagttagaagcattgttagataaagttatggaggaggctcaagatggcactagaaaatctgatgacaaagaagcagatacaagtcctgaagagctatctgaatgatgactggaagacgatgattctatctggtgctgttcgttctggtaagacttacatcgataattatatattcctgctagagctaagacgggttgctgagcttgcaaaaagaactaatgatacaaatcctaagtacattcttgcagggttcagcaatggttcaatttacaacaacattattagtgagcttagttctacctttggtatagagattaaatttgatagccatcgacactttaaattgtttggtgtcgaggttgtcccagcttatacaggtagtgtacgtgggttaggtgctattcgtggtatgacaagctatggtgcatacgttaacgaagcatcgcttgctacctatgctgtctttcaagaaattatccagcgttgctcacaaccgaatgctaggataatttgcgacactaacccagacacacctacacattggctcaaggctaagtacatagataacaagaaaccagaagctaagattaaggtttacaattttacgattgatgacaacaccttcttagatccagattatgtaagaacactcaaagcttcaactcccagtgggatgttttatgaccggaatatcaaagggttgtgggtaactggtgatggcgttgtttatcccgactttgataaaaagagaatggtcgttgatagagttcctgatggtttgacttactattgcggtgtcgactgggggtttgaacacaagggaagcttacttgtattcggagatgatgagcaaggcaacacttacttgattgaagaacacactcatcagcacaggtttatctcttattgggtagacttggcacacaagattcaggataagtacggtcacaacattaacttctggtgcgactcagctcgccctgataaccttaacgaatttcaaacagcaaatatcagtgcatttaacgctaagaaggcaatacttcccggcgttgaatctgtagcaaaactaatgaagactggacacttctttgtgaaaaaaggagctgtcgagtctttttttgatgagatatatcagtacatttggaacgaacaaactggtgaaccactcaaagagaacgatgacgtaatggacgctatgaggtacgcaatttacaaccagcatttggaaccagcagcaatgacttttaagacctatttaggaggatagtatggcagacgataacaacaaaatatttcaaggcaaaggagcgatttcaagtaatcgctcttttatttatcccaaagacacagaacttactggtaatgatttaattgagtttatcaattacaacgatagccacctcaaacctcactatcgcactaatatggactactacttaggacaccacccagtactggaacagccagctaagcagactggtgcagacaaccgactagtggttaatctgcctaagtacttagtagatacatacaacggcttcttttcaggaattgcacctaagatttcacttgatgatgataaagacaaccaagcactacaagactggaacaacgtgaacagctttgtggataagttaaacgaaatatccaagcaagctgatatctatggcaagtcctatgccttcgtttatcaagatgaggatagtcagactagagttacatactgcagtccaagccatgcttttatggtctatgatgacacagtcaatcgagaaccattagcatttgtacgctatcactatgacaattcaagcgatgcaacggctaaagggactatatattattctgatgctagttatgactttgtaggaccagcaattaatcctgaacctactcctaatttgtataagttagttccagcagttgagttctatgagaacgaagaacggcaaggcgtgtttgacggctgcattactctaattaacgaactggatagagcgcttagtcagaaggctaaccaggttgaatactttgacaatgcttatctgtatatgctcggtatccaactagagaaggatagagatacaggccaacctaagcttgatttgaagaacgatcgtttcatttatgctccagctgatacggcagttaacggtaagattggcttcgtgtctaagcctgatggggacaacatgcaagagaatcttatcaatagactgaccgaatggatattccaaacagccatgattcctaacatgaacgaccaggctttcagcggtaacagttcaggtgttgcactccagtataagctcctcccaatgaaaaatagggcttcaaacaaggaacgtaaattcgttcattcattaagacatctctatcagattatctttagcgttgggactgtacttcctgatagttcaaaggataaatggtctgaattaacatttaaatttattcgtaacttgccagccaacgttgctgatgaagttaacagcgctcggaatgctgaaggcatcatcagcaagaagacgcaacttggcttgctatcctttgttgatgatccagcttctgaaattaaggctatggaacaagagcaagaagataagattaagcaagcacaaaaggctgctgattctatgccagactttatgaagcaagatgacgataagcaagagctggacgaggacaagaacaatgcagaacaggaagagtagtgcttactgggatgcacgtgagtccgctgagcaggcttggatgaaagagcaactggctaaggatgaacgcttcaacaaagagctagaccgtgcttatcaagtagcaatcgacaatatcaataaagagattcaagctaatattgataagattggtggagtacagaacctagtcactgcctctcaaatggctgagtatgaaagattagctaagcaagcagttgaccatgccaatgaattgatgaaagctggacacaaggttactaagaaggacttctctcctgaggtaaatgcaaggcttaaggtgtacaacgcaaccatgagagtaaatcagctggagctgatgaaatctaagattgcagtacacaatcttaaccttggtatggatatccaggctaagatagctgataagctctatgatgattacatcaaagagatggaacgtcaggccggaatactaggcttaagtgcaaaaaatgctagcttgtggaccgatagagaggttatgaatttaatcagtgcccaatctgctaacggcgtgttcagtcagcggatatgggctaatactgatgtgttaaaggctaagcttgacggtatccttgctacaggaattatcaggggttctaatccacgtgaaatggctaggtaccttagagaccaggtcagtgatacattcaagaatgctgtttatgcttctgaacgactagctagaactgagtcagcaagagtccagcacaaagcacagctcaaatctttaaaggataatggttatgatttctgtaagtggcatcttgaacctggagcttgcaaaatatgcattggaattagagaagacgctacgaagtatggtttaggtgtttatcgaaccgaagatgttccagatattcctgtgcatcccaactgcaggtgtgcaatcagcgcttactgggtagacgaggataagctagctttagctaatgaaacaactaagattaaggaaccagcggataaaaatatctatactgtaaatagagagcttattaattctaagttatatcatgataagtttgagaagctagcctatccaaaggcggttagagaatcgttatatcaagaagcaatgaaaatcttaaacgaaagaaataatactccctatgaaagcttggttgctttagacagcagaacagggaaattggtagttaaaaataacactactcatacaccttttaagagtggtcttgctcataatcaaacaaaaaagttctattcgtacactaagccaatgattttaatgcataatcatccgagaaatagtagaccatcattaacagatttattgacagcatctttttcaaacgttgatagtgcaatgataattggacataatggtattgtttatagatattggactgacaagtctaaaaatgtgcaatctatatttgatcaatgttataataagtatgcaaaagaaggttatattaaagaaatagcctattctaaagctatagatgatttattcgaaaaaggagtgattcactatgaaaaaagataaagaaaagcttatcgatgaaaagataaagaaaattttgaattctgatccattggatattttaggtgatgatactcttttagaattaattgatgcggaactaaagtaataattttgaacaaaaaaacatttcaagaactaacaacacgttagttctttttttatgcctttttccgtgtgttgtaggcataaaagaacaacctgagtgtctcccacgacggtaaatgcgagtttagaaaggacaatgaatatgcctaacgaagaacaaccaaatgtaactaacaatggccaagaagttaagccagaacaagctggtaatgctgaaccaaagccagaaaagcaagacgatggtaaggattatgacaaacttacctcagaacttgaaaagttgaagaatcgaatcggcaaggaacagcatgaaaagcatgttgctaatgatcgtattaaggaacttcaagctgagctggataagtataagcaagaacaggtggataaagaccctgaaaagaagcaagatgaaacagctaagcaattagaagaacttaaaaagaagaatgaagaactcaatcaacaattagtccggaataatcgtttgaatgaagtgaactcaatctttaaaaagtctgggcttaatattagcgatggtattttaaacatgattgttactgaccctaacgacggcgacagtatcaatgctaatacccaagccattgtagatttgattagacaggttcaatccgacagcaagaaagaactacttagaggtaatactcctaaggcttctggcggagaagtagacgctattgctaaggctttaggactttagaaaggatttataaatggcaactattaattacgtcactaaggacggcgcactttttgatcaaaagattcaagcaggtttatttacatcagtactaggaactccagaagttgacttagtagcaggtggtaagagctttactatccgtactatttcaactacaggatttaagcctcatactcgtggtaaaggcttcaactcaggtgaagtatcagacactaagactgtgtacactatgactcaagaccgagatgttgaattctatattgaccgacaagatattgatgaaactaacaatgaattagctatggctagaattacaaatgttttcatcagcgaacatgttcaaccagaagttgatgcttatcgtttcgctactctttacaagaacacagaagctgataagaagagtgaagtagcaattactgtggataactcatactcagaacttaagaaggctatctctaaacttcgcaagtatggaccagaaaatgttactgcttttgtttcatcacaatttatggattgcttggaacgctcaaaggaattcacacgcaatatcacaaaccaaaatgtaggtactactgctcttgagtcacgtatcacttcaattgatggcactcaaattatggaagtatgggatgacgcaagattcaagaccgaatttgactttactgatggatttaaaccaacagcaggtgcttctggctttaactttttagcagtagcacgtccagcaactatcccagttgtaaaagaaaatgcagtgttcttattcgctccaggcgaacactcacaaggcgatggcttcctatatcaaaaccgtttgtaccacgacttgtttatcaagccagctaagaatgacgcaattgtagcatcaactgctccaaaaaattagctccgtcccaagcggtagaggacgttaaaccaaccgcaaactcaactgttgctgaaatcaaagcttacttagataagcacagcatcagttacactagctcaatgcttaaagatgatttgctaaggctgattaagtaggtgatttgatggaatatttagcagatgttaagcagttgttgatgatcaactcaagcgataaggataatttgctgaatgtaatcttatctaataccaaaagagcactgacttttaagctaggattaggaacaggagaagaaattcctgaacaattgagtttcatcgtggttgaagttgcaattaaacggtttaatcgtttaagaaacgaaggtatggctagctattcgcaagaaggcgagtcaataacatttgcttcgaatgatttcgacgactttaaagacgatattgcacaatggcgcaaggataatggcaaggaagataagtccttagggactgcttacttgcttaatcctttgggtgggtcaaatgaggtttgacacatcggtaaccttttataggtcagctccagcacgatataacccccgtacacataaatacgatggggaagattcaattgttaagcaaagttgggctaatgttactgctttgggattagaacgctctatgcgtgtatttggagaatacaaggtcaatcggaaagttgtaagaattgctgatgattgtccatctgattgggactacttaaaaatcgagggtggttccagcttttacagactggatactcaactcaatgttcttaaaggcacagcaattattgtccgggaagataagacagtaaaggagagtgcttcaaatgggatttaagattcaagttgacggcgttgaaacaacaattcgtggcaagcttaacggtaagcgcaagatgcagaagttcagaggcgttgttaaagaatacggcgctaaacttcaagaccaaattcaaaccaatatgaccgagaagtataaaggacactacgctggcaagaagtttgtacttccaactggtgcaactaagcgaagtgtaactgttaacttaattaataacggtacgattgctgaagtagggcctcatacttactacgctccataccttgaatttggtactcgtttcatccctaaaggtaagtatgcgacagtatatccagctttgaataagatttctcctaagtttaaagcagcagttagagaggtggctaaggaagaatgacaccagctcaagaattatttgatgcggtctttatcaagtgccaggacctgggctttgatacctatgacggattgccactaaaagaagttccatatccgtttgtagtgattagcgaagttcaattagaccggcttaattggaagactgccttaggagcccgtttatcaattgacgttgatatttggggagatagtcagatgctatctcaggtaaatgaaatagctaataaggtgctcaactttaatcagcttaaaggagagaaccttatttttgtgcaaacaattggcagtagcaattacagactaatcaaagatacaagcattgagaatacgttactaaatcatggaattgttagccttgaattccggctagcatagaaaggataaaagaatggcacaaagtgaaattcaagtgttacaaggtattgataccttgttatatgtgcgtttgttagaaaatgcaaaaactgaaagagcacaattgattccgtatcagacctctctttcatttgacccacagcgagatatcgatactactaagactaagtcaggaaatgttcctacaagttcttcattagaaactgaccttgaagttgaattcgtaaacaatatctctaaagtttcagatgacctttacgactcattgattaagagtaagaagattgaagcatggattattcatcgcaagcgtaaaaactccgaaggcaagtactttgcgtggtacatgcgtggcatcgtttcagaagattcaaacgataatgacccagatgataactcaactcgagatgtaacattcacaatcgaaggagaaccacaacgtggttggttgactttacctggggatgcacaagaagaactagcatacgtattccgtggtatgggagttatttcagattctgatactactggtgaaggtactgcttggaaagatgctgacaagggtactggttcagatactccctcaaaatagtatttttgcagggcggacttaggtctgctctgcttttttattgaaaggattacgataaatggaattagaaattaaaggcaaaaagtacgaattgaattttggtgttaagtttgttcgcttggctgatgacagactgggcctaaagaatgctcttaatgttgaattcggtatggctttgggccgtatcattccatctctaaaaggttatgatacggctgttttatcagaagttatttcaattgcagcaactccatctctatctttaaatgatgcagatgcttacattgatgatccaaatactgatatcgaagcattgctcaaagacgtacttaaagaaatggaaagcgctaatgctgtgaagcttgcagcaaaaaaactcaagggctagataatagccctaaaaagactagtgaacaaacctatcatgaaatcctgctgaattcgctagcttatttaggatttactgatatcaaagagattgaaaaaatgccacttgttgaatatcaactacgaatggaagcttaccaacttcaagaagttaaacggttagaatctatacatttgcaagcattcctcaatcagtcagttcaagcaacaacagggtctgccaagcatcctaaacctaaatttaaccgttttgagaagttcttcgatttgcaaaaggcaattgatgatgttcgctcaagctttgaagaggactatcaaagaacaacaactccagctcaagaagcacagcaaatatttgctaagcgcatgcgtgagttcagaaaactcaaagctgaaggcaggattattccaatgtcagaacggaaaggaggttaaatatggcagatgacgttattgtaaaaataggtgctgttgacaatggattgtccattgcatttaacaaggcgggagaagcagttcaaagttttggtacaactgttaataaaagcttaggaactgtaggtaaaggcttaatggtagctggcgcagcaactactgcaatgggtgtctcatctgtaaaaagctttgggcaatttcaacaatctttgaatacagcagcagttgttgctggcggtactagtaaagatattaaagggttggcagatgttgctaacaaaatgggggctgatttaccattaagtgctcaagatgcagcagatgccatgattgaaatggctagaaatggtgcctctcttgatgatttgaaacaacagtttccagcgattgcaaaggcagcaactgcggcaggttcagatttacaacaaacggctggagttgttcaactagctatgaatgtttgggggaattctctcaagtctcctgcgcaagcagcagaaattttggttcaaactgctaacttatcaaatgccagtgttgaagaaatgagacaggcaattgctgatgttggttctacagctaaactttgcggatatgatatgcaaacaacatcaacagctatcggtttactaactaattctggtttgcctgctgcacaagccgcacaagatttgaactttgcgttgttaagaatggttgcaccaactaaaggtgttaaatcagctatgcagcaattaggtatttctgttcgtgatcaaaatggtaatatgaagccacttcctacaattttgaatgatgtagcaaaagctactagtggaatgggaaaagcccaaagagatgctgctttgaaagcattatttggtactgcagggatgaaagccatggttccattgcttgatgcagtaaaagataagtcaggtaaagcatcaacttcttgggatggcttctcaaaagctattgataaagcggcaggctcaactgagagagctaataagactttggatgaacaagcttcagaaatgcaaaaaaatgttggagcaaaggtagaacaattaggcggtaattgggaatcactcagaaattcagtaatgcagtcaaataataagatgaccgggtcgattcttgatttaatgaataatactttggactgggctcaaaattctaatagttctattgcgaaagttgttagaggatttatcggtttgtctcccgtaattgggcctgcaatgactgctgtaggtggttttttaactaaagccaaaactataggttctgttttgggaggaacagtaaaagtagtaggtaaggttggtggagcatttattaactggggtagaagcctagttggattaccacctgttttgtctcaagttactactagtgcatcaaaagcaggaaaaggttcaaagcaattaggggaaggtgcagataaagcaggtgctagttccaaagcaagtgcaaaggaaattcttgcaatgggtgcagctgcgtttgaaattggagcaggtatagcagtagcagcagctggtattgcattattagttttgtcagtcgctcaattagcgaagacagggccagctggtgcacaagctcttttagcagttactacttcaattgctactcttttagcggttttgaagatagtaggaccatctcttaaagaaaatgcttctggattacttgcatttggtgcggctgctttagcaattggtgcttcaatcggtatagcttctgcaggaattgccttattagttgtatcgcttactcaattggctaaaaccggcacaaatgtcccagctacaatgttggcaatcggcgctgcattaacggcttttgctgttgggctaggattagtttcaccgttgctacagaagaatgtagccgggattatggcattctcagttgcagcattagctgtaggttcagcgattgcgattgcatcggctggattggcattactggtagcatcgcttactcaattggctaagacaggaaccaatgcaaatacaacagttttattaatcgtgggtggtatcacagcattagttgctgtttttgcgttgttagggcctgcattaaccgcaggaattgccggaataatggctttttcagttgcaatgatagcaatcggaacagcaatcgcaattgcctctgctggattagcaatattgattacagctttaactaatttgattactactatggctactttgaacatatcgggtcagcagtttatgactacaatgcaacaaatcgggataggactagcaaaattaattactagtttcgtaacaactttagttgctgcaattcctcaaattattgctctagtgttgaatggcttagttcaagtaaatgcaatgctgattcaatatattccaatttttgcagcacaagctttacaaatgattgctggatttctaaacgctttagcacagggaataccgcaagttatacaatcagctactaatttaatagtcaatttctgtaatgctttggctcagaatatgccacaaattgttactgctgcggttaacttgattactagctttgttgataccttaactcaaaatctgcctaagctaattgatacaggtgttaattttattgtcaatttaattgagggtattacagaaaaaatacctgatttagtaaatgcagctgtagatttaattactaaatttttagatgctttagctaaacgagctccagattttgttaattcagcaataaatttgattcttagttttattgatggtgtagggcaaaagattagtgatgttgtaagtgcagcactgaagttgattagacaatttttgaaggctattacagatgcaattcctaaaatgacagatatagccgtagaggctgttggaaatttcgtagaaggtgtaggttatgcattaggacgagtactttcatctggtggtgaactgattcaacgatttatttctggtgttttaaaaggacttagtggttctagaaatgcaggtaaatctaatggtaatgcggttgaatcggctcttaaaagttttaatctaatttcaattggtaagtatttgattagtggatttattagcggaattactagcatggttggtagtgttgtaagggctgctgcaaatgttggtaaagcagcagtaaacagcattaagagtttcttacatatacattcaccgtctcgattaatgagagatgaagtaggttattactttgttgctggttttgctaaaggtattactgataacctcagaatggcgagtcaagcctctaatagattggcagaagcatctgtttttgatgtaccttcaattgatatgactaattacaaccgaggaattaagcaattaacttcaaacgatatgtctggatcaattgcaacagacctaagagccaatttggctgttactcaacaaccagcctatgtaactttgtccttaggtggaagtgactaccaaggatttgtcgatgatattagtaagcaacaagatatgagtgttgctcttagaaagaagagactatagattatgaaacagtacgaatttcacgacctagacgttaatactcgtggcgacccttcgtggttaccacctgaagcactgtatatcaggtatcctaacggaactgcacagccaattgaggatttgattgatggatatcagactttgacagtaactggtagagagttattgccatacacagtcaattctgcggaagtttctggcatggacggtacagtttttagagaggccaattatccaagccgtgagattgttgtgaagtatcagctcctaagcaaggatgaaattgagtttagagctaagtttgaacgtttgaattacctacttaagaacaaagaattcaatttctacttctacgatgacccactgtttgagtaccagggaactgtatcagctagtgatacaccagatgcaggtaagcttaacgtggtaagtacattcaccattacttgctctagtccgtttaagcgattgatacatccgactgtgtacaacttcactgatagttgcttgtttaccgagccaatttactgggcaactgatcctgattcaattgagattacgatgaaacaagcaacaacaaacattgttatcagcaatggaacacaaactattaaagtggtgggcagttttaaagctggtgacaagcttctttttacctttggggataattcagatatccagctaaatggtcaatctaattgggggatgctggatttacttagcgattatgagaactttacccttgaacaaggcgaaacattgactgtgagtccttcttccagcgtgattttaaagattaggagaaagagcttatgagattgctactgtttgacaaccacgagcaatgttttgcagtagttactagagcaatttcagcgacgatttctcaagaaattaatatttttgacgaattgtcggttgaagttcctaagactgcaatcaatgtgaaaaattttgaacgagcaatgtatattggagtaccaattaagcaggatgatcggtatcagctgttcaaaatggagaagccagaaacaggcgacagttcaattactgtgacggccatagaagcggcttctgatgatttatcagttcaagggtatatagatgaccgtaggtttgttgataaggcaatcagtgcggtaatccctacgatatttgaaggctctacctgggagttcaagaactatgttccagatgacgacctagaaaacatcaacttctataaaatctcacgtaaagaagcaatctctaagctaattagtacttatggagttgaagtccagttcttttacaaagtagaaggtaaccggataacccaaaagctatgtgagattcataaacaaattggcagtgagagaagcatccgaattgttgaaggcaaaaatgctactagtattaaatacacggtagatcaaacggaactttatactgctgcaattggtcgtggagctggtatagcaatcactgatgactcaggggatgctacaggtggctattcacgtaagattgagtttgatgatgtcgtttggtccaagagagcaggcaatcctgtagacaagccagctggtcaaaactatgttgagattcctgaagcaactcaaaactatggttggcttgataaagcgggaaagcgacaacctcgattagcaatttttgattttgacaacgagcaggacaaagccaaattgctacaaaaaacctatgataagctccaaaaacttgctgggcctcaagtattagttgagactacggttgctaagctgggtaaactgccaatgcttggggatggagtaacagtagtagcttatcatcctcataaatttgtagtacattctcgtgtaattaaacgaaaaatagatttgattgatgaagcatattcaaatcttgaaattggtactagtaatatcgagaggcaagctgagagagaacaagctattcagacggatatacatacctccaaagctgaaactgataagaatttttcagaattaaatcaaaaaactgatgatttttataaaaatcttgagaccaagattgatgaatctgcagatgaacaaactagaagagcccaagaagcgattaagaggattgaagatgaggtaaaggaaaaggttgagtcgactagatcagaaatcgaccaatatattaaacaaaattctaatggtccgattgaattgattgatactaacggtaactttatacaaggtgttggtaagattaaagaaattagatcagaagatggtaatttcgtaattaattcctctggatttaattgggctgggcgtttgattggtggcaaaggaaagctatatgcagatgatattgttggacgtgaaattactggctatacaattacaggtgcacatattacaggtgggacaataaccggtgtttccattactggttcttcgtatgtaaattcggtatcaaccagatatccagatgatcaaaaaagatgggcggttattagtggtgattatggatttacatatagtgcagcagatagacccggaagttggataacgttagatgcattatcaattggtggggttgacttaacttctgaacaacttaagaaaattaaagagaagtgtggtgtttaatgctgttcaataatcaagtagaagctaatgatgtaattaatgagttaaccgcttcattagctcttaaagaaaaagaaatagcagtgttgaaaatacaattgttaaattatcagaaaaaaggtgcagaatttgagcaatggctaaaaaaaactgcacctaatttattaagtacgtatagaaaggaggaaattaaatgtcagaaacagataaaataactctacctattcttgaattagatttacaaaagactactacttatgtagctagaccatttagattgacacaaggagataagggatactggcaggccttccatttatcagttggttttcaaccatatacaataactgcggataaattgtgttttgcgggcactaaacctgatggacaacttatagatataacaaatgagccatcacgatttgaactgcgtgatggggtttggtactttaaacttcccgatgaattagcacaagcagttggtacttttaccggatacttctatgtagttcaaggtggtactactgttgcaagtacgactaaatttgcttatgaaattcttgcaaaattcggggaagatgaagtttctaattcttatgtatctatttttaatgatttgcgtgataagtttagccaaatcgttgagagttcgagaatggaattaaataactggacttctttaaataataaagctagggcggatttagaccagcttcttaaagatttaaagacacaaaccgataactggttaaaagctaaaactagtgaaatagaagctttaattgctaaatataattctaaatacaacgaattagtcagtcagtggaacaatcaaattacgactcaacaatctagatggcagagtcaattaaaccagcaacagagtgattttaattctcaaaaagctaggattgacagtgagtatagacaacagctagaaaatttgaagtcgcaactcaatagcgagtggcaacaacaaaagcaagctcaacaagctagttttgatagctttaaagctgatttaacaaaccgtattagtcaagctaagtctgatattgatagcattcaaaccaaaacaactgagttacaagccaagcttgatgaaattaacaacaaagttcgagatgttgatttcaatagttttataaaagttgttaatggaaatgctaatgatgatttagctagatttcgtaatatgtgtcaattgcgaatttatgatggtaacggccaaaatgttaagagcgtaccgtttcaaaataattggttcagtgttcttgtcaatatgcattctaattggggaactttaacatacttgggtcaggataaaagtatttggcaaagttcttgcaatggcgaccaatggaccagttggactagactagcgtctatggataatttgaaccaaaaggtaaatttgaacgaaagcattgcatattcaggctggttacaatctgacaaaacatataaagatatgttaggcgatacgtggggttatacagataatggacatttaagagtattttcaactgatggagtaataaaagattggactaatcttttaggcagttactcaactgggcttattttcggaactggtgatgttagagctacaatgtccgtatcgcaattcagaccacaagttagattttctggaggtactactgctagtggcaaaactagtcctacttggcatgaagatatagcatggaagagcgactttgcaaattattacaacaagtccgaggttgatagaaaagtcaatatttctgactcgttaagccgaggattaatagaccaaggaaccagttggcaacaaattttcggtaatgatgcattgaatactaatacaggtcatttaacggttttcaaaaactcaagcaatgattataggccttatatttatggatattcagcaagtggtatagcttttggcgctggagatactcgaggtatcttatctgttagatgggacaaacctggaataatgattgcaggtggtaatggcactggacctaagtgggctagagaattagctattaaagatgactttgcaaactattacaacaagtccgaaactgacacgaagactaacaacttgcagggtcaattagactcttacaaagctcaagtatctagcttacaaacacagctaagtaccttacaatcgcaaatgagtaacctgttgagcgtgattaacgtttctgatggctctttaaacgtttcaggcaatttaattgttaaacacggtaatatccaaaattattggggcggtgttgaccagtacgtggcttacagtcctagtggtgttaagcgtggctacttcggtgtatgggacaacggaacgttccaagcacgggggaactagttaggagagaaatatgttgaaaacggactatatcgaacctgcacaaatgatagaaaatcttaagcagaagctatcagaagcagagtatcgagcaacgataaacgaaattgtagtcaatcagtatcgagcgctgattgacgacttaagcaaaaaatatcctcaagtcaaaaaagaacttgaggacaagtacagcattaaacaaggaggctaattatggcagaagaaaacaaacaagttgaagctacagaagttgtatcaggtcaagaagaagctactaagcaagtggaagtaccaaagccggtaactgcagctgaaacaccagttgaaccagttaaaggcgctaatgtgtactatttcagtaacgacaaatactattgcgttccaattatcacgccttacgaattgccaaatgtgtatccaattactaccgaagcaccaagcaaggatttgaagaaccctaaatacgattggggtttgatgaagtggggcgaaggcgacgcaaagaacttgcaagctcaaattgctaaggttgaagactcggttaaggctttaactactagccaagcttcaaacctacaaattaatactaaaatgcaaattagcttggacgccttgcaagctgtaattgctaagcaaacacagctcttaactcaactttcaactcaacaagcagcaacaacagaaccaaaatcagaagaacaagcttaattttaggaggctactaactatgacaatcgcagaactttttgaatcacaatacaaatatttctatggcttaggtctattttccaaggaactaatcgcttcttacgtcaaacttggcgtaattgatggcgcagcttacaagagaattgtgggtgaagactatgttgaagttactacaccggctcaaggctaataccttgcataatatcttgggattcgacttaatcctcacaggatatacgctagtaactgctgaccatttctttttctatccaccgtatcctcctcagattcttgctgtgttaaatagtgattgggtagggtactttggaattattattgggctatgtatgatactttggtccgagaaagatacttatcttttgcgaaaaagaattaattctattagtgtaaatacgtttttagttgtgagtgcaatcaccttttttggctttttagccagtatcgagatgatgcactttttgtttgccaacggaggaccgctaatgctgactaacttagtagcagatattgcgatgctttggttggctttttatgtagctaaaaattcaaacactagatactagaaaggggcgcatttatggatttagacgcccttttatcaagaatattgccatttttgagtacgataacactagcatttatcggatattatcaagccaaggctaagacgaaaagcgacaaagagaaagatgagtacgaccgattaattgcggagaacaatcgtattaagtcagaccttgagtattatcgcaagcggtggagaacagccgaagatgaacttgatcaattaaagcatcaagttgatgctaggtcaggtcctagcgttatcagaaatagaaatttgaaaccagaaaggaaatacaaaaatgaataagccaagtttacaagtaatgaattatattgcattagtacaaagttcagttatcgcaattgatgaggtgccagcgtatttaaaagctgacgttgagaaatggttagcatttttcaagaacggtaaggtaggaggtgaagacaatggattggctaattaataatctgccagcaattattcttgtagttggtttcattgcaggctattacaactatcttaaagaccatgatccagcattagcgcaaaagattaaagtaatcggtgaattagcaaattatgctgttagcttacaagctaccaaggattactccaataaggagaagcaagcagaagctactaaggctgttatggagcaagctaaggcagtaggtatcaaagtaaccgaagctactgctaaaggtgctgttgagcaagctgtagctaagcaaaaagaagaaacgcctaagcaagtaactactgaaaataaaactgttgctgataaagtgacagaaaaaaaggaaggtaaagtagccgcacctactaagcctcaattaactgaagaaaaattagatgaattaaaactttaggaggggcatatgttaaacggatatgacatttcaagtcataacgctgaagctggatttagagtagcaaatgtaccatcagattttgtcattgttaaagctacggaaggtacaggttacactaatccatattttaaacgtgatgctgatgatgctttagcacagggccgcttgcttggaatctatcactatgctacaggatataattggcaagcagaagctgatttcttcttaaattgtgtacaaccttatattggtaaagctgttttgattttagactttgaagcagaagcagtaatgcgtgggaaagttgcgttcgtaaagtcatggcttgactatataaaatctaaaacaggaaatttaccatggttctatacatatttaaatgttgagaatggatatattaataagcagaatcctcaaggctttgattggtcatctgttgcaaacacatatcctttatgggtagcacaatataataattacaatccagttactagctatcaacctagagacttatatggttcgttgaagttctggaaaaatatgacagcttttcagtatacttcaagcggtagaatcggaaatccaggctctttagatttaaatgtattttatggtacaaaagctgactggcttaaatatacaaataacaatggagaaaaagaggtagatgaaatgagttggcatccagaagtgaagtggaatcaattagggatgtttcggattaatcgtgaaaacggaattaatctttatacgagtcccgaccttgcaattgtgacacaagaagatggtcatgatgcagttcgaaaatatggtgattttgtcatttggcaagctaaaggcggggctgttcgattaggtactgatgtgcagtgggcaagtcaagcagatggcttaaccaaaattaatcctttagctgttaatgacagtgctagagctatctgtaaaataacgacagatgatgcttacacccaaaacgaaccagactggaaagctggaggtatcaaacatttgcctaaaggaagtacttggcaagtctttggtagagtagataaatacctaattgttggtggagaaaaggatggaaaatacatcaatggtgacaaggctgttatagttctttaacaaaataaacattcaattgacgcaaaaagcactcggttagtaggttgtactaactgagtgcttttttatttgttgttctatacgtacataatgtgaaaatcaacaaaaaagtgatagatttacacctaccactttttttgttgcacaattgttgcacaaagtgctgcccttatctcatatcaagccttgaaaacattgatataacagcactcttgattgggatattcgggttcgaaccgaaacattatggaaccagaatccactgccttaccaatttggctatatcccagttaatcgcccgtacgagaatcgaactcgcaactccgccttgagagggcgacgtcttaaccatttgaccaacgggcaatttcaacagtcttaattatcctcatattttataatgctgtcaagttgttttaaaatctaaaacaacgtattctaaataaaggtgatagtttatgagcgatttttttcgaacacaatatttaatcgaaagtatggtatcagaacggattgttcctggtgttaattatgcttttattaaaaataatcaagtatttaaggcgacaattggttttagtgaaatttatccagaaactaagcaattgagtccatattctgaatatgatttagcaagtttaactaaggtcttagggacaactaatgtttttttgaagctctatcaagaaggtaggctaaacttcaatgagccacttggtgattttttacccgaatttaaagataagcctgtacgtttatttcacctattaactcatacaagtggtattagaggttggattgaaaatcgggatcagttgccagctagtgatttgctagaggcgataaaaaaattaccagttactgatgaatttgaaacaaaaatgcgctatgcagacactaattttattttgttgggattggtcttagagcaaatttatcataaaagtgtccaagatatcattatggatgaagtagttaagcccgcaggtttaaaatatacaacttttaaggcaaataaggctgattgtgtacccacagctgtagtagatggacaattgctacaaggagttgtgcatgaccctaaagcgcgagtattaggcaaacgttgcggctctgctggtttattttcaaatattgatgatcttataaaattaacttttggttatttgggaagaaataatcttttaccatttagccaagaattaacgagtgagatttttggtataaaatcaaattctaaaaaagtgcatccccgttcatggggctgggatttagtgtttgatcctgaagatcaacatccgctaatttttcatactggctttaccggaacttttattttgattgatcgtcaaaaacaaactgcgatgatagtactgactaatcgtgttcatccaactggtcataatcaaatctttttgacaatgcgtcagagaattgtcgatagttttctagcagaaaataaataagccatcacatttttgtgatgacttattttttaattaatcttatttttcaaaatcttttgatcatataatgtgctgcgtaaggcaagcattgctgtataagtggctaggatatagacttttttggttggggcttctttaattcttgttagcaaagtattatcgtctggggtaacttccatagttcctggatcaaagcccgcaacttcaagtctgaagcccatatcgtgatgacgttcaccaccaacaagtatttgtttgactttagttttatctaagccttcataatcagcgtcccaaatccagctagtatctattccatcagcgtgatgagcatttaataacgtagctaatgtataatcacttttttcagtatttagtaagctaagtacttcattcaagccaacaggatttttaactaagattaggttgatttctttatcagcataagaaattaattcttgtcgcccaaagatacgcttattcttagcaaaagcactggcaatttcatcttcactaacatcaaattctcgagctacactaaatgcagccaaagcattgtagatattataggtaccaccaatgccaattgaaaattcagtgttttcaattctaaatttaattgagttaggtgttctttctgtgatttctttcagcttataacttaagtttggacgcttaaatccacagttaggacagaaaaagtcacctaagttagcatagctaatagcatggtaatgaataatatgattacatcttggacataaaactccatcagtattaacacttgctctaaagtcattggtcatttcatcggcttttgtttcaaaaccataaaagactttcttattaggtagttcaactgaagagaaaatacttgcatctccattagcaattactactgcatcaggagctagcttaataccgtcaataattttatcgtatgtagtataaatttcaccataacgatccatttgatcgcgaaaaatattggttaaaacatatgctttagggtgaagaagttcggttacgcgtttaacatttgcttcgtcaacttctaaaaccgctaatttgcgaccatgacgtttagccttatgacttaaaaaagcagtaataatcccttgttgcatgtttgaaccagatgggtttgttaaaatttcaccatatttttcttttagcgcattaacaattaaagcagtggtcatggttttcccgttagttccagttacaataattgtttcataatctttagcaagatttgctaaaatattagggtcgattctcattgcgagtttcccagggaaacttgtcccacctttaaaaatattgtgtaaaacccaatgtgatgtttttccagaaagttttgcaataccagattttagattcatgtctttaatccctcttatttcgaactattttttactatatcatatgaatggatgtaaaacgatagttaaaagcttagactgcacaaatttaaattttcctctatactattagaggaactttttcgaaggggaaaaaagatggcacaattatttttttgttatggaactatgagtagtggcaagacaattgaaattttgaaggttgctcacaattatcaaatgcaaggtcgcaaaatagctttaatgactagtggtaaagatgaccgaagtggtaagggcattattgcttctagagttggcttgaatagtaaagctacaccaattgaagatgatatgaatatctttgaatatgtaaaaaagcaaaatgaaaaagatattgcaaatggtgatggagctattgcctgtgttttgattgatgaagcacaatttttatacaaacatcatgtgctagaatgtgccaaaatagtagatgatttgcatattccagtaatgacttttggattaaagaatgatttccaaaataatttatttgaaggaagcaagtatttgcttctttatgctgataaaatagaagagatgaaaactatttgtcattactgtggtcgcaaagctacaatggtaattcgtgttcaagatggaaaacctgtatatgaaggagcacaattgcaaattggtggcgatgaatcatattacccagtttgtcgttttcactataattatcctggtcaaaaaagagaagattaagtttattgtaaaagaagggaagaattaaatggataaggtaatggctcaactagaagggttagtagctcgttatgaagaaattcaagaattgatggctgaccctgaagtaattaatgatactaagcgctatatggaaatttcaaaagaagaagcagatatgcgtgaagttgtccaaaagtatcgcaagtatcaagaagatcaaaagacaatttctgataataaagaaattattgaaagtgaatctgatgcagatttagttgaaatggcaaaggaagaaaatagcgacttagaaaaagaagttgctgaccttgaagaagaaatcaagattttaatgcttccaaaagaccctaacgatgataaagatattattatggaaattcgtggggctgctggtggggatgaagcttcattatttgccggtgatttgctcagaatgtatgaaaaatacgctgaaactcaaggctggaagatttcagttattgatgaagaaacaacagaagttggtggttacaagcatgttgccatcatgattactggtgacaaggtttattcaaaactaaaatatgaaaatggtgctcaccgtgttcaaagaattccagtaactgaatctcaaggtcgtgtgcatacttctacagctacagttgctgttatgccagaatatgaacaagtagatattgacttagatccaaaagatatcagagttgatgtttaccgttctagtggtgccggtggtcagcacattaacaaaacttctagtgccgttcgtatgacccaccttccaacaggtatcgtagttgcaatgcaagatcaaagaagtcagcaacaaaaccgtgctaaggccatggaaattttgaaatctcgtgtctatgactactatgaaagtcaaaaccaagcaagttatgatgaaaagcgtaaaaacgctgttggtactggagatcgttcagaaagaattagaacttataactatcctcaaaaccgagtaactgaccacagaattggtttgactttaaacaaattagatcgaattatgaatggtgaacttgatgaaattatttcagcattaattgttcattaccaaactaagcaattagaggagttggcagaagataatgcctaaaacattaaagcaattagttcaactaggacaagaaaaagcccctgaagcaagtgttgatgatcttacttatcttgtcagtgaaagagctaatttaactccaagtgaatttaaattaaagcaagatactgaagtaagtagcgagttagaaaagcaacttcaaaaagacttcaaaaaactagccagaaatgtttcaccgcaatatattcttggttatgcctggtttttaggttataagattatggtgcaaagaggagtgcttattccacgctttgaaactgaagagttagttgaatgggccttgaaacatttgcatgatgggatgaagattttagatcttggcactggttcaggtgcaattatggtcgctttagctaaagaagctgccaaaaaagatattaaagatttaactttatatgctagtgatatttctgattctgctttaagaatctgtgaagagaatttcttaaaatttgcccttgatgtaacagttcgtaaggcgaatgtcttaattgggttagaaaaatttgatttgattatttcaaatccgccatacattaaacctgaagaaaagaatctaatggatagcaatgttttacaaaatgaacctgaagaagctctttttggtggagaagatggcttagagttttatcgcagatttgctaagcaaatccgtaaacatttaactagtcagggcgagtttttcttagaatttggctttagtgaaaaagatgaattggctaagctgtttgcaacagaattaccggattttgatattgaatttaaggatgatttagccggtaagccaagaatggtatatggaaagtggcaaaaataatggaaacacaaattttgaagaaagatcaaattgatcaagcagttgaatttctaaaaaaaggtgaattagttgcatttccaactgaaactgtttatggccttggtgcaatcgcaactaaagaagaaagtgttaagaacgtttataaggctaaagggcgtcctagtgacaatcctttaattgttactgttagtgatgaaaacatgatgaagcgctatgctaagtttgttcctgaacgtgcagaaaagttgattaaacacttttggccaggtcctttaacacttcttttattagttaaagaaggtagcttacctgatgctgttactggtggtttaaagactgctgcatttagatgtccaaatgatgaattaactcatgaattaatttcaaaacttggttatccaattgtcggcccttcagctaacacttcgactaagccttctccaacaactgcagagcatgtttatcatgacttaaaaggtaaaattagtgcgattattgatggtggtgctactgaagtgggacttgaatcaacaattattgatttatcagttgaaactccaattgttttgcgtcctggtcaaattacacctgaagagttaagtgaagttttaggagaaaaagtattaattaatactggcaaagtttctgataaggcgattcctaaggctcctgggatgaagtatcgccattatgcaccaaatgctccagtttgggttgtagatgatacaaatgattttggaaaaattgagtttaagtcagatactgccgttgctgctcttgatagtgtcttagagaagcttgatttaccagcagagaataaatttagcttaggtaaagacttaaaagatgcagatcataacttgtttagtgcacttagattctttgatgatgaagatgaaattaaaacgatttatgttcaaggctttgatgaaggcgaaaaaagcctggcttacatgaatcggctaaataaagctgccgcagggcatcattataaaaattaaaaataattcagagctaaaggtttaaacctttagcttttttttataaaatattactgatgttggtattttattttaggaggctaatatgggaaaatttacagttttgaatcacccattgattcaacacaagttaaccatcattcgtaaaaaagacactggtactaacgaatttagacaaatcgttggtgaaattggtggattaatggtttacgaaatgacccgtgatttaccactgaaaaatgtggaaattgaaactcctattggcaagactactcaaaaagaacttgctggtaagaagttagttattgtaccaattttaagagctggcttaggtatggttgatggagttttgcaaatgattccatctgctaaagttggacatattggtatgtatcgtgatgaagaaactttgaagccacatgaatatttcttcaaaatgccacaagacattgaagaacgtgatgtaatcattgtggatccaatgcttgcaactggtggtagtgcgaatatggcaattgaagctcttaaaaaacgtggtgccaaaaatattcgcttagctgttttagtagctgcaccagaaggtgtgaagaatattcaagaagctcatccagatgtagatatttatgctgcagctgaagatgaaaaattaatggataatggttatattttcccaggtttaggggatgctggagatcgtttatttggtaccaaataaacaaataaattaaatatgtataacttttttttaagctaattcgctttcatttttttacaaagatagcgaattggtggtattatgaatatcgtgtttgaggtattcagcacaggaaaggaggtcacgaagttatggagaaacccgaaatcctcaagttatttgggcttacctttaatgtcagcaacatattaggtgggaccttagtagctttaattgtatttgggatgtgcttttggttagctcgtaaagttgaattacgaccaggtaaaaagcaaaatgttcttgaatacattattgatttcactgatggaattgtgaaaagcaatgttgaagatgaagatgcacaaaagcatttatccctttatgcatttgtcttattccttttcatttggtggttaaaccaattaggtttattcctagaagtcaaagatatgagtggattgatgttgttaaagtcaccaacagctgatccaactattaccatgaccatggcaatgatgacattactgttatcgtataactttggcgttcagaagtttggaacctttggctatttaaaaaattacgctcggtcattgccattcttcttgccaattaacgtaatggaagaatttactaacttcttaacattgtcattgcgtttatacggtaatatttatgctggtgaagtattgcttacattgattggtaatgatttcgctcacagttttggaattggaaccattattttatcagcacctttgaccattatttggcaaggtttctcagtcttcattggctctatccaagcatatgtatttgtaactctttctatggtttatattggtaagaaggttacacaagaatagtttatattcggaggttattttatgaagtttttagctgttgctatcgccgcaggtttagcagctcttgctgcatcatacggtaacggtaaagttatcagtacaaccatccaaggtatggctcgtcaaccagaaagcgcatctgaattacgctcaactatgtttatcggtgttggtttgatcgaagctgttcctattttggcagttgttattgccttcttgatcttcttcttaggttaatctgttagaaggaatttattagagagaagggcagtatatgactaacattttgtttgccgctgaaaagtctgatctttatttgggagacaccatatattacctagttttatttgcaattttattattggctgttaagcattttgcatggggcccagtcactgatatgatggaaaagcgtcgtcaacaagtgattgaagatattgataaggctgcagatgaacgcaaaaaagccgaaattttggctggtgaacgtgaagaacaattaaagagttctagacaagaagctacgcaaattctctctactgcaaaaactaatgctgaagcagctggtaaggatattttgaatcaagctaatgaagaagctaaaaatatccgtgaaaaggcgaaagctgatgcgattcaagctaagagtgatgctttgaatgaagcacaagcacaagttgctgatatctcagtacaaatcgcagaaaaggttattgctaagaacttatctgctgcagatcaaaaagatttagtcgaccaatttattaaggggttgaataaataatggcattaagtagagaagaaatcagtgcacgctatggtgctgccctattcggctattgtcaagatactaattctttagacaatgtttatggtgagttgcaagttttaaaatcagcagttttggataatcctcgtttgagcgaagttttatcttcacctgtatacagcattgaagaaaagaagcaattattgaaaaatattagtgctgatttttctcaagaagtacaacaatttttagaattattacttgattatggtcgatttgcagtgctacctgatatcgttgatcaatttaatatgcgctataacaagcttaataatattgcttttggaaaggttattagtgcagttaaattagacgatgatcaattacaaaaacttggtcaagcttatgccaaaaagtataatctcaaagaattaaaattaactaaccaagttaatccatcaattatcggtggggttattttggaagttgaagattatataattgatggcagtgtaaaaaccaagctaaagaaaattcgtgcacaattagttgaaaatatttaaaagaggtgaaagcattgagcatcaaagcggaagaaattagctcattgatcaagaaacaacttgaacacttcgatgacaaactcgatatcgacgaagtaggtgttattacctacgtcggtgacggtattgccagagcacatggtttaaacaatgttttggctaatgagttacttgaattcgaaaacggctcttacggtattgcccaaaacctagaaactaatgatgttggtattatcattttaggtaaatatgacaacattagggaaggtgaccgtgttaagagaactggacgaattatggaagtccctgttggggaagctttaattggtcgagttgttaatcctttaggtcaacctgttgatggtttaggtgaaattaaaaccgataagacccgtccaattgaatcaaaggctcctggcgttatggatcgtcaatcagttaaccagccacttcaaactggtattaaggctatcgatgccttggttccaattggtagaggtcagcgtgagttaattatcggtgaccgtaaaactggtaagactagcttggcaattgatactattttgaatcaaaagggacaagatgtcatttgtatctatgttgcgattggtcaaaaagaatcaacagttagaagtcaagttgaaacattaaagcgctacggcgctatggattacacaatagtggttgaagcaggacctagtgcccctgcaccactactttacatcgctccttatgctggtacagcaatgggtgaagagtttatgtacaatggtaaggatgttttgattgtctttgatgacctatcaaaacaagccgttgcttaccgtgaactttcattgttaatccgtagaccgcctggtcgtgaagcataccctggtgatgttttctacattcactcaagattacttgaacgtagtgccaaacttagcgataagcttggtggagggtctctaactgctttaccatttattcaaactgaagctggagatatttctgcatatattccaactaacgtaatttctattactgacggacagattttccttcaaagtgatttattctttgctggtactcgtccagccattgatgctggtgcgtcagtttctcgtgttggtggtagtgcacagattaaagcgatgaagaaggttgcaggtactttacgtgttgaccttgcctcatttagagaacttgaaagttttgctcaatttggtagtgacttagaccaagctactcaagcaaaacttaatcgtggacgtagaattgttgaagtcttgaagcaaccattacatgaaccacttcctgttgaaaaacaagttttgattctttatgctttaactcacggcttccttgactctattccagttgaagatgttgcaagatatgaacgtgaacttgattctaactttgaatcaagtcattcagacttgcttaagacaattcgtgaaactggagatttgccagatgaagacgaaatgaatgaagctattaagagcttcaacgaaggcttcacaccaacaagtaagaactaggaggtaatttatgcctgcttctttacttgaattaaagaaaaaaattgcgtcagttaaacaaactggtaaaatcacccaagcaatgcggatggtttctgcagcaaagcttaatcaaacagaaaagaaggataaaggatacacactttataatgacactttgaaaaagacagtttcacacttaatgagtgctcaaattgtcgatcatttaaagagtgaaaatgtacctgttaattcaaaaaacgttgctaaacttgattatacaaatgtatttggtttaggcattgtttctgatttgattcaagcaagatccgaagttaaatctacaggatatctagtaataactggagatcgtggattagttggttcttataactcaactgtaattaagaacatgatgggtttgtttgaagattctaaggctgaaaataaagatgttaaagttttagctgttggtagagttggcgcccaatttttcaagaaaaacaatatgaatgttgtttatgaaaattcagggataagtgatgtcccatcatttaatgaagtattaccaattgtttcaactgctataaaaatgtatttaaatggcgtatatgatgaattatatgtttgttatacgcaccatgttaattctttatcatcagctttccgtgttgaaaaaatgttgccaatttctgatttagatattggtagtgaagaagctgaagcacatgaaaaacttgagtatgatatcgatccagatattgatactgctttgaagtcattgctaccacaatttgcgcgttcaacaatttatggtgctatcttagatgccaaaactgctgaacatgcaagttctatgacagctatgcaaagtgcctcagataatgcaagtgatttagtttctaggttaactacgcaaatgaaccgtgcaagacaggcacaaatcaccactgaattaagtgaaattatcggtggtgctaatgccttagaataataagaaaaggaggtagatattgtgagtgaaggtgaaatcgttcaagtcgttgggccagttgttgatgtacaattcccaattgacaaaaatttacctgatattaacaatgctttgcatgttattaaatcagatgatgaaacaattacacttgaagtaacacttgagcttggagatggtgttttaagaaccatttctatggaatctaccgacggtttaagacgtggaatgaaggttgttgatacaggtgcaccaatttctgtacctgttggtgatgacactttaggacgtgtatttaacgtcttaggtgacccaattgataacggtcctaagttccctgctgatcaccgtcgcgatagtatccacaaggaagctcctaagtattctgaattgactaccagccgtgaaattcttgaaactggtattaaggttattgacctccttgaaccatatgttcgtggtggtaaagttggattatttggtggtgccggtgttggtaagactactattatccaagaattaattcataatattgcccaagaacatggtggtatttcagtatttactggtgttggtgaaagaactcgtgaagggaacgacttatactttgaaatgaaggcatctggcgttttagacaaaactgccatggtctttggtcaaatgaatgagccacctggtgccagaatgcgtgttgcattaactgggttaacaattgctgaatacttcagagatgttgaaggtcaagatgttcttttattcatcgacaatatctttagatttactcaagctggttcagaagtttctgctttgcttggtcgtatgccaagtgctgttggttaccaaccaactttggcaactgaaatgggacaattgcaagaaagaattacttctactaagaagggttctgtaacttctattcaagctgtttatgttccagccgatgactatactgaccccgctccagcaactacttttgcccaccttgatgcaactactaaccttgaacgtagcttggttgaacaaggtatctatccagctgttgatccgcttgaatcaacatcaagtgctttggatcctgaagttgttggtgaagaacactacgaagttgctacccgtgtacaacatgttttgcaacgttaccatgaattacaagatattatttccgttcttggtatggatgaattgtctgatgaagaaaagatgattgttgcgcgtgctcgtaagattcaattcttcctttcacaaaacttctttgttgctgaaacatttactggtgtaccaggttcatacgttcctgttaaagcaactattaaaggctttaagttgattttggatggtcatttagatgacttgcctgaagatgcatttagaggtgttggatcaattgaagatgtaatcaaaaaggcagaaaagatgggtgtaactccatctgacccagaagctaaggccttaatagcagaaaagtagggtgatgctttatggcagaatctgaaaaattaatgacagtaaatgttgtgactccagatggtttgatttattctcataaatcaagcattgtcgttatgagagctgtagatggagaacgagcagtgatgtataatcacactccattcctaactccgcttgttatcggtgatgtgagagtcaaaagaggaaagcaattaaataatcgtgttgatcatattgctgtaaacggtggctatatagatttctcaaataatgtcgcaacgattatcgccgatagtgctgaacgtgcaagaaatattgacttgtcacgtgcagaagctgctaaaaagcgtgcagagcaacatttaaaggaagctaaagctagtcataatgaaagctcatatgaaagagcatcagtagctttaaagcgtgctgttaacagaattaatgttcatcaaagtacacaacaaaaataactgaaaaagcaaacgcctagcgcttgcttttttctttatcaaggagaaatttatgcaacaattaggtttacatgcacttttaagtttatttatatattttgtaacgacagctttggcttttcaggcaattaaatgtctagatttgagtaaattattcaaaataaagaaaatatttgaagaacaaattttatatatctttttagcacttggcttaggttatttagtagggcaattttttatcgcgttcatggattattctttaacactaacaaatctttttaataattaataaagcaatcataatcaagcaggcaagatgagcccaagtatggtataatttttcgtgatataaaattggaggatatactattggcaaaagacatcggaattgatttaggtacagctaatgtattaattaacgtatcaggaaaaggtatcgtcttaaatgaaccttctgtagtagcagttaacacagaaaataatgaagttgtagcggtaggtacggaagcatatgaaatggttggtagaactccaggaaatattagagtcatccgcccattaaaaaatggggtaattgctgattttgatattactgaagcaatgcttagttacttcattgaaaagcttaatgttaaaggctttatggctaagcctaacattttaatttgtgctccaactggcgttacatcaatcgaacaaaaggccattattcaagctgctgaaaaatcaggtggtggccgtgtttacttggatttcgaacctaaagttgcagcagtaggagctggtcttgatatctttaagccacaaggaaatatggtaattgatatcggtggtggaacaacagatattgccgttttatcaatgggtgagattgtaactgccaagtctttacgatgggctggtgacaagatgaaccaagcaattgtaagttacataaagaataatcgtaacttattaattggttctagaactgcagaacaaattaaaatcgaaattggtagtgcatttgaacctgatcctgaaaagaagattactgttcgtggtagagatatggttgcaggacttcctaagcaaacaactatttcagcaattgaagttcaagaatcattacatgatggtttaatgtcaattgtacgcgcaactaaggaagtattagaacaaactcctcctgaactttcagctgatattattgaccgtggtatcatgcttactggtggaggagctttacttgcaaacttagataaattaatttcatattatttacaagttcctgtattaatagccgattctccacttgaagcagttgctttaggtactggtgcattgcttaagaatattgaaaagcaccaaggccgttaggtgagaatattgtcaaaattattaatctttttggttcgtgtttatcagaaatttatttcgccaatctttccgccaacttgtcggtactatccatcttgttcaagttatatgattgatagtttgcgaaaacatgggccgttaaagggtttaataatggggattgcgagaataattcgatgcaatccctttgttcgtggtggagttgatccagttccggaccactttactttaaggcgaaatcctcatccagaaaattatgaggatccaattattgccaaaaagtttcattctaaataggagtaattatgtctaaaaagcttgaaaatatttcaattgaagtaaatgaacttaaaggaaagtcaattcctagttgggaagttattattccaaataaaaaagctattggtatcattgaaaaagtggaaggtcgttatcgcgcaactaccaataagagcaataatgttcttttttcaaagagtttagaaagtagtatcaatgatttactttcatattttgctcttcatgaaaaataaaataggtcgtgattaattaatggcaaaactacagaataagactgatatttacgatcgagttgcttggggaattgttggagcaattgctttattggcaattattagcttttacgcaatttggatagctgcaagtaacgattctacgttaggaacgccttttaaagcagttgttggacaggcagtttggtatattttgtcgattgcaattgtaattgttattatgcaatttgatgcagatcagctttttaaaatagccccttatgcttatggactgggaatagtacttttaatcttggttttaatcttctatgaccgaagcagctttgttaacaatggtgcgaaaagttggtttaaattagggtcactaacttttcagccatcagaagttatgaagccagcctttattttgatgctagcaagagtagttaaagatcataatgaatattatggccatacttggagaaatgactggatattattaggaaaaatatttggttggctagcaccaatagccgttttgttaaaattacaaaatgactttggtacaatgttggttttctttgcaatcgttggtggggtaatattagtatcagggataacttggaaaataattttacctacatttattgtaattgcagtcctagggaccacaacgatattattagttacaactaattgggggcaggcctttttaggacatttctttaaagcttaccaatttgaaagaatcaattcctggcttgatccatcaggtgatacttcatcaggtgcttaccagctgtggcaaagtatgaaagcaattggatctggacaaatttttggttcaggatttggaaaatcaagtgtttatgttcctgttagaagtagcgacatggttttctctgtgttaggtgaaagctttggttttgttggtggtgtcgtattaataatgatttatttgtatttgataattcaaatggtcatgattagttttgacacaagaaatgccttttattcttatatttcaactggaattattatgatgattttattccatgtttttgaaaatgttgggatgagcattgatttgctcccactaacaggtattccattaccattcgtttcccaaggtggatcagccctaataggtaacatgattggtattggtttgattctatctatgaaatttcataataaagattatatcttctcaactgcaggagacttctaaaaaagctttaagtatgttgttacatacttaaagccttttttgtatattaagtttttgaattaatcagatttttattgcaaaatctaattaaaattatatactttttaaagtggataatccgggttaaagattaaaaaagaacgataaataaagatgaatttatggcattaattgcttgttctaaagatgttattggaaactgtcaaattttttgtgtaaatagatctttctcgtaaattgtttttttaacgttttatttattcaaaataggattctaaggtatcctggacttgaccaaagcctttgtgaattcggttgaagtagcggtcattgtagctcattgcttggatgccaataaaagtatcaagcgactgttcagtcgggaactccgctttaggcttagccttgcgcttaatgacgttattaaaggattcgatcatgttggtagagtaaattgaagccctgatctgcttaggataattataaaaaacaagcaggtctggctcgatgtctttcaggtttctaatgacacgattgtagctcttgttccatttggcataaaaagcatgcaatacatcaacagcagccgctttattggcttgctggtgaatctgcttgaattcgttcatgattgcctcgcgatcgtccacgcgtactttagcgcagatgttgcgcataacatggaccaagcagcgttggaaatgagcttgaggataggtctttgccagtgctgctttcatgccgacaacgccatctgaaaggaaaagctctacttgctttaaaccacgagatttcatgttctggagcaacgccgtccagacttcaatattctcactaggcgcaatgcagtagtcgataacttccttgtgaccattaggcttgatgccaatggcaatatatactgcttctcgttcaaaagtttctcgacgcaacggtatatacgttgtatcaagataaacacaaaagaacttatcgctcagcttacgcttgtgataagcctcaactttaggaatcatttgcttagagatattagacacttgagctggactataatgactgccatacattttttcgatcaaattagctatttctctagtggttacacctttagaataaagctttataaccatatcttctaagagatcagtatgttgtttatagtctggcagagtgtgttgatgaaacataccattgcgatctcgtggcacttgtacctcaattgatccaaactgggtatcaattttacggaaatacgcaccatttctagaattaccagtattccagccatttctagcatagggatcatatcctaaaaaggcagtcagttcagattctaacatgtcattaacagcttgttggatttcatgacgaagcaaatcattaattttatcttgattgaatagagcttgagttatatttttggtaaaatcattcatgaaggagttcttctttctgtatgttttttttgttcaaaccaatcatacgagaaaggaactcctttttctaatgttttaggaaattaaattaaggaataattcatccttacacaaactattttacggtctctgttattgaaatcaaaataccatctaataaatattaatgctaataagataaattatttgttataaatttgtttttgtgaaaaggagaaaagataatggttgttgaatcgaagatactggaacagatcaaattaactttaataaaaatcgggggggggtaaatacttcactgtagacggtgttttaaaaagaaatgcagtgattaatgatttagatagatatgataaggatctaatgacagcactgcttaatgatgaactaatccataaaaactttactaccaagatagcagatattgaaatctttgaggtcaacaagtttattgatatgctccgatacaaggaatattgggcaaatagttttaccaaatttaataataaaattggtttagctgttggagataagtacattgatgattcttcagacgttgtattgaatttcccttacaaggattgtgtgcttaaagctggtatgactaaagaagatgttgaagatagtgatgatgctaatgaactatttttaaatgaaaccatagctaaatctgaaattgatgaattgcttgagccaaaaatccttgttaatgcacttaaatatgatgaggatggttcaaaaaaattgaaaatattactgataaagataatttgataattaagggaaacaatttaattgcgttgtacagcttagttgatagatatgcaagtaagataaagcttatttatctagacccaccgtttaatacaaaaaatggagattttccttataatgacagatttaatcactctacatggctaacctttatgaaaaacagaattgacgtggcaagaaaattactaaaagaggatggacttatttttattgaaatagatcacctggaagaagcatatttaaaagtattgctcgatatgtcttttgggattcaaaattatgttgccactatttccgttaaatcaaattcaatttcaggaagtaaaacctctcataaaggtaaaactatattaaaaaattacgattcaatattagtatataaaaatggtgctgaaaatataaaaattaatccgcaatatacaccaaaggaaaaatgggatactcattatagtttttatcttagaaaaaacagtaagaatgagttagaaaaagcgagcctgaaagacttactgatagaaaaaaacattttagaaaggggagaaagtataaaagctaacatttgggataataaagaatttcagaaatttgctaatgaaaataaagataatattttcagagaagttaattcgataccagatgatctaaaagaaaaaagcattgagaataaagatcagatagtatctttaaatcataaaggtaaaattatgtacgctttaaacggtacaagatattctcccttatccagttcatataaaaatattaatggggagagtgttccagctcaattgttaggagatttatggactgatattgattatcagaatacccaaaatcaaggaggagttagttttacaaatgctaaaaaaccagaacagttacttaaaagaattataaatttgtgtactaatgaaggggatatagttctggattgcttcatgggttctgctactactcaagcagttgccttaaaacttaaccgtcaatttattggtgtagaacaaatggattatattaataccatatctgtaccacgtttacaaaaggttatagaaggtgaacaaggtggaatttctaaaaataaagatgttaaatggcaaggtggaggctcatttatctatgctgaattaatggaaaagagtcaaggttacctgaaggacattaaagaagctactgacgttgatgaattgatgacagtctataaccgtatgaaagccaatagtgacatcaactttagagttgatttagataagtttgaaaaagaatttcaaagtggagaattgactacattagatgatttgaagaaagagctcattttaataattgataaaaaccaactttactataattattcaaacatcgatgatgagaccgtaagaagtcttatctctgatagtgactacaagtttaacaagagcttctatgctactagaggagaatgaaataaatggtaaataagagtaaaaatagtaatattaaaccactaccttttctttaaaaagtacatgaaggaatttcaagaatcgattatgttccttacgattatcaatatataaatgagagtttaaaacataatttaagaccttatcagctgtctgctttattcagcttagactgggtgcaaaagcatgatgaagttcaacaacataatcatttaatgtttaacatggccactggctcaggtaaaacagatgtaatggcatctaacatcttgtacttgtttaaggaatatggttatactaattttctttttgtaactaattcaaatgcaattgttaacaagacaaaagaaaactttttaaatagtaattcatcaaaatatctttttgcgccaaccataaatatagatggccaattggtggatattaaacaagttaaaaattttccattaaatcaacaagctaatgcgatctatattaagttgaccaccatccaatcactttcaaatgaaattaattattcaaaagaaaatggattgaccatagaagatttagagaattataagatagttattcttgctgatgaggctcaccactttaacgctcaaactaagagtcaaaaacaaaaagaaacctcatgggaagaagttcttgatcgagttagaaatgctaataaattaaatattcaacttgaatatacggctactatcgatatcgataaggacgaagtttacgagaaatataagaataaaatcatctacaaatatgatcttaatcgctttatggatgatggttattctaagaaagttttccgtcttgaagctaataatgacaacaatcagaagcttttaaatgctatcctattaagtcaatacagaaagagaatagctcataaattaaatattagtgattttaagcctgttgttttagtaaaatccaatcgtattaaaacttctgaaaaggttaaagatagtttcttacaaatgatggaggatttatcttcagaattcttagctaagtttatttcagaaaatgctgaaattaacaagaatagtatggctttatcaaaagcttatgaatattggaaaactcaagatttatctaaggctgtagaagaacttcaaagagattttaatattaagaccactatcaatgttaatgaaggtggtactaaagggatcgtgagtgaagaagcagactttaagaaattgaactctttggaagatatcaataacccatttagaataatttttgcagttgctaaattaactgaaggatgggacgtcttaaacttatttgatattgttagaatttcagaagaaaaagaatctaagacaatcaagcagacaaatgcagaagctcaattaattggtagaggtgccagatactatccttttgtttacaaaggtgaaaagtcatatactcgcagattcgatactggtgctgactctacttttgagaatcaattacttgaaagtctgtactaccacactatcaatgactctggatacatcaaaaacttgaacaagtcatttgataatatgaatttgatagcaaatcaagatggtaattatcaagtattctctgcagacgtaaagaaaactttcctgaaatctaatttctataagaatggaaatatctattacaacaagacagtacaagttcctgactccgaatacagagatttaaaggcttacggaattgacaatcaaactatgattattaattacagtattgctactaccgaaagctcctttaaacaggcatatacgagtctctctgaaaacaaagtcaagttagttaatgttgttgatttttctaatttaagtgactatagattagttaaaaaggctattgccaagaatacatttttccgtttttctgaaatgaaacaatatttgccagaattaacttctatcagagagtttataacttctccaaattggttaggcaatatttcaattttagctagagtacccaatgaatatactcttaacttggatgataagttaaaagttatttctattgcactaaaacaaattcaagctcaagtggtaaagaattatcgtaaagagaaaggcacaaatatttttgttccaatctcagttaaagaaaccgttaaagattattctaaattagtccctcaacgctctaataagactatttctgaaattattcttcctaaagatatgagtgccaaagaatggtacccatattcaactgctattgttgaccaacttgaaatgagtttcatcaatcttttagatacttgggtcaacaaattaaaggaaaaatacaaggaaatatatcttattagaaacgaggaaactatttcaaagtggtcactccacgaatttgaaaatactgatattaagcattatcaaggatataagcctgactttattatggtcttaattgatgcagactttatttaccaaatatatgtggaacccaaaggggatgaatttctggaaaaagatgcttggaaacaaaatctattggaaagcatcaggcctgagaagattaaagttttagctgaaaatgataacattaagctttatggtgttaagttctacactagaggtgatggaagaaatatcagagaagaacttcaagatttaaaaattctccctggtgcagaggaaaaacatatcgatgaactaattttataaaatcagttactatattaataatgaactgaataaaaatagagacttctaaaaaagcttttgaattatttctgacgaattacaataacgtcacattcagcagttctagttacgtattcagtaacactaccaattagcaatctttctactgcattaagacctgtagcacctaaaacaattaagtcggtttgatgcttctttggaaagtcgtgagcaatgattgtttttggtgaaccaaattcaatagaatagtgaacgtccttgatacctgcttttactgctcgatcataatattcttctaatttcttttttgcatcagctgaaacttgttctaccattgctgaatcaaaactagaaacattttggaaggatctagtatcgataacatgtaaaatttctaagctagcattatttcgttttgcaattgcaacggcttttgtaaaagctaaatcagcttcttttgaaccatcaactgcaatttgaatatgtgaatattgctttaacataatgagcacctctttcttaactttattttaccaaaaaactaaaaatatatgattagtttttaaattattttttagttattgttatcccaaaaaataaaataactagacaagccaatgaaatagttaataggtttagcaaaatattgttgagaaataggaaaaagatgccaaagagtgtaattaatccaagacttaaactggtagcagtcatgcagaatttatagttcttttgggaactgttaaatatcagaaaactactatttcttttagaccataaaaaatatgcaagtagaaaaactaacactaagaaaattagaactactattttaataatcatcaactatcatcctatcaaaaaagcggctccaaaggaaccgccgttaaaatctataaaaatccgagctgactgtcgaactgtaaagacgcttgttgatcccgctaatagcaagtttatatggcctgtatcgcagtgaatatggatcctgctcgaggcagttttccgattcagtagttatttacagacctccacgtcgtaggtttgatcggtcaactttgtactttaattctatcaactcgaatcacttattataatagcagaattttaggtaaagtcaagaaatgtatccgtttgcaaaagctatgctatctgcgattattcaatcctttttcttgtaacactttgagctttttatattgatttttaagtgccgattcaatttttgaattgccttttggattaaaataactatcatgaattaatgaatttggcaaatattgttggggaatccaatcattagtgtaattgtgaggatagagataatcagttccatgaccgagcttatttgcaccagaatagtgactatcctttaaatgattgggaatagagccaattttcttattacgaacgacatctaatgctgtatcaactgcagaaattgcactgttacttttaggtgagagtgctagttcaattactgcattacttaatggtattcttgcttcaggaagtccaatttgttgggcagtccatacagctagtgctgtatgttgacaagcggcaggatttgctaagccaatatcttcataagcaattaccaacaaacggcgacaaattgaaatcaaatctccactttctattagtctagctaaataatgtagagctgcatcagtatcagaaccacgaattgatttttgaaaagcagatactaagtcatagtgcccatcaccatttgcatcaaaattttgactttttacttggatagaatctgccatgatttcctgggtaattactaacttattttgggtatctttaccattttctgcataagtagataaaacagctaattctaaggcgttaagtgtggcacgtaaatctccattacctttttcaattagtaattgttcagcatcactgttaagctggacatgatatttacccaagcctcgatcactatcttttaaggcgttttgaattgctatttgggcatcacttgcagaaagaggatgtaattcaaaaatttggcatcttgaacggatagcaggcgaaattgaaatatatggattttcagttgtagcacctattaggacaatttgtccagattccaaaaggggaagaagaaaatcttgtttggttttatctaaccgatggatttcatctagtaataagattactgttccactcattttcgcttcgagagccacttgttgtaaatctttttttgtatcggtagcagcgttcaagatcctaaaggcatattttgttgaaccagcaattgctgaagcaatgctggtttttccaatcccaggtgggccataaagaatcatcgaagatagtaattttgcttcaaccatacgacgaataatctttccagggcctacaagatgttgctgaccaacaacttcacttaaatcttttggcctcattcgataggcaagtggcttcattcaacatcacctctatgaaatagcttatgccaaaaaccttcttttttaggagtagctaattcttctttaggaaactcaggtggataaacttgcttaagttcaattctttctttatttattgctgatttagcaacaactaaaatggcagctgaatccaaattggtttgtgctgactcatctgaaacgagagtgaagggaatattttcctttgcgcatgctgcttcgatttgatcaattgtctcattttgtggcattttcccatttatcaaaatttgataaactttatagtcattaatgtgctttaagaaaatttcgagatttgcaggatcacccaaatccttgattgtcatttttagataaacacgttcacgcaggcttcccaaaaagcggtgccgttcatctggtttggtttgcagtgggccatgagatgattgctctaggcgttcatttaaattatctgccatgtaattaacctcctatgagagtaaagaaaaagcctttccataccaatagtaggaaagacttcttccaaaagcaaccaaaaattaaagaagtttgttgtagtattcaacaacgagggcttcgttgatttctggttccatttcgtcacgttctggtaaacgaactaagctaccagttaacttgttttcatcaaatgaaacaaatgatggacgacttacaactgcttctaaagcatccttaacttgttgtaagttctttgacttttccttcaagctgatttcttgaccaacttttacttcgtatgaaggaatgtcaacacgcttgccatcaactaaaatgtgaccgtggtttaccaattgacgagcttgttctctagtagttgcaagacctaaacggtaaacaatgttgtccaaacgacgttcaagtaataccatgaagttagtaccgtgttcaccttgacggatcttaccagcacggttgaacaagtttctaaattggcgttcgtttaagccgaacatccaacgaagcttttgcttttcgtgtaattgcataccgtattctgaaagacgaccacggttgttaggaccatgttcacctggtgcgtaattacgacgagctaattccttaccagtacctgaaagtgaaatacctaaacgtcttgaacgtttccaacttgggccagtgtatcttgacataaaaatcctccattaaataaataaaaaataattgatggagtaaaatatctgaaataagctctgcattcgttcatctgcagttgaactttcgctcattgcagcacgagttactaattcactaaaacgtccacagatgttgacgagcttgccaacttatcgctgcaaatattttacacgatgaccattatagagatttttaaacttttttgcaaggaatagcattaaaaactatcttttatgaatgaaaaaattgtgttgtctgttataattaatggtagttttggaggaaaattatgtcgtcaatacaatctctcattataataagtattgtcgttttgttgattgctgcaactggaagtatgttaatgctcaatcgccgacaaagtaaaattttatctttttttgaacaagatttaaatgatttagaagatctcggtatttctgctgatattaaaaatcttgctcagatggaattagctggagaaagtctgaaaacttttaatagttggaagaaagtttatgaaaaagctaatgaaaagctgattccagatttacatactagaatcgaacaatgccaagaagttaatactcattacaacttgttaagagcaagaaaagagattaaagcaattgattcagcaattgattcggtatctgaagacttaaataagacaaaagaagttttccgacaattgcttgagtctaatcgcgccaataaattacaatatgattctttaattaagatttatcgtgacattagaaaagaagtcttggcagcttcattttattatggtccggctttagaaaaaattgaagatgaactcagtgagctagaaaggcattttaataacgctaagaatctatctgctcaaggtgattatattgaaggtaaacgtgttcttgaaaagattgataagcgtttagctcacttaaaagatttattacctcgaattaaaaaagagcaaaatgccattcaagatgtttatccagaacaacttgatgaacttacagatgcttatcgtaagatgaaggttgataaattagccgtttctaaaattgatttcttagaagaagtgaagaaactacaaaacttactagaagaatctaaggacttagaatctcgtttagaaattgaaaaattagaagctaacaacaataaactagctaaaaaaattgatagtttgtatgacatcatcactaaggaatattcagcccgtccatttgttcaacaaaatcaagacaaaattcttcgcttgttatctcatttagaaaatggttctagtcaactgattgataaacttgaacacattgatcaaagctatgaattaacacatggtgagcttcaagaagctaaagatttgttaaaagaagttaccaaaatggaagaaaaatataattatgatgttcaggctttggctgatggagagggggtatattcagaaattaaggaacgttggctaaaacagcttaagcgaataagtgaaattgaaaagcgtgagcaagagttagttgatgaagtagatgggctttacgaagctgagaaaatggctaatgagtccattgctggatttaaacaagatgtcgcactgatttatcgacgtttgcaaagaagaaacttaccaggtaagccagatagttttattcaaatgtatactttggttgttaatgagatatctcataccagtcaagaattaaatcaagttagaattaatatggaaaagatttctgaagaaatgattcagatatcagatgatgtagatcgtctaaaaaaggaagcagatcaaattatcaattatgctgctttggttgagttgacaatgcaatattctaataaataccggagtaatccaaaagtagctaaagctagaagagctacgatggatttatatagtagggcttataattataaggatgccttggatacgattgctacagtgatggaacaagtggaacctggaagttatcaaagaatagaaagtgcctattattttcaactaagcactcctgaagatgaccaagacgattaaattgctcatttagcaattttaagctaaaatcaaatagttagacaaacgaccaagatcttggtcgttttttcgaggagattattattgtgatttattttgataatagtgcgactactagaattttccctagtgctttagagacctacaataaagtcagtgaagaaatctggggaaatccctcaagtttacataaattaggagatcgtgcccatcaactgttggaagcatctcgtaaacaaattgcgggtttgttagaggtaaaacctaatgaaatatttttcactagttgtggttcagaatctaataatttggctattaaagaaagtgcattaactaaaagggaatttggcaaacatattataactacaagtgttgaacatgcttctgttactaatacttttaccgcacttgaaaatatgggctatcgggtaactcgccttccagttgatagtgaaggccgaattaatattaatgatttaagaaacagccttgatagtgatacaacattagtttcaattatgggtgtaaataatgagataggtactattcagccgattattgaagcaggagagttactagaaaattatcctaatattcattttcatgttgataatgtccaagcatttggaaagaatatttggaatcaagtattttgcccaagagttgatttaatgagcctgtcagctcataaatatcatgcgccaagaggtgtgggtattctttacaaaaaatctggcaagatgctacttccattaattgatggtggtggtcaggaaaaaggtttgcgctcaggtacggaaaacttaccggcaatagctgcaactgcaaaagcaatgcgcttagttagtgaaaaggcacccgaaaattatgaacgtgaatatgctattaaggagcgaatttataattatcttgctggtaagccagggattacaattttttcaccactaaagtctaattttgctccccatgttttgaccttttctttattaggtattagaggggaaactttagttcatactttagaacaaaaaggaatttacgtttcaactactagtgcatgtgcttcaaaggtgagtgaggaagcaagcactctagcaagtatgaaagttgatgaaaaagttgcaacaagttcgattagattgagctttgatgcaagtaataccttgcaagaagcagatgaatttattaaggtatttgctaagatttatcggcattttgctaaagttaatcatttaagataggagtaatttatgcaatatactgaagttatggttcgttatggcgaattatcaactaagggcaagaatagaaaggattttatcggccgattagctggtaatgttgaaaaagttcttgctgatttggaaaatgtaaaaatttatcccaagcatgatcggatgcatatcgttttgaatggggcatcatttgaagaagttgatcgccgcttgaagaaagtttttggtattcaaacctattcaccagttataagaactgagaaaactctcgaagcgattaagaaaacagcacttgaaattatgcaagctgtatataagtcagggatgacctttaaagtaaacactaaaagagcagatcaccactttgaatatgacactaatcaacttaatttaatggtaggagattatttatttgataacttacaagatcctaaagttgagatgaagcatcctgatgtcgtattacgtttagaggttcgtcaagatgctgtttatatatctaatcagttattacatggaccgggtggaatgccagttggtacagccggtaaggcagtaatgatgcttagtgggggaattgactcaccagttgcatcatatcttgccttaaaacgcggtgttgatatagaaatggtccactttttcagtccaccatatactagtgacaaagctttagctaaggctaaagaattaactggtattttggcaaattattgtggaaaaatcacttttattgctgttccttttgctgaaattcaagaaactatcaaagaaaagttgccagaaggttatttgatgacaattcaacgtcgctttatgcttcgcttagcagatatgattcgtgaaaagcgtaaagggttagctatttttaatggtgaatcagttggacaagttgcttcacaaacgcttgagtctatggctgcaataaataatgtgacaacaactcctgtaattcgtcctgttgcgacaatggataaaactgaaattattcgtttagcagaagaaattggaacttttgatttatcagtaatgccatttgaagattgctgtacaatctttgcaccaccacgtccaaaaactaaaccaagaattgataaagcaatcgaatacgaaaagcgtttagatgttgaaggacttttacacagggcaatggatggtattgaaattagtacaattaaacctaatgaaaagtttattgatgatcaaacagctgatcaggacttactttaatgcgaattgataagtatttagcgaatatgaatgtgggatctcgaaaagaggttcacaatttaattaaggctaaaaaagtcactataaatgaaaagcttgttaaacaagctaaacaacaagttactgaaaatgatatggttaaagttgataatcaaactataacttatcagcaatttcattattttatgttgaataaaccaactggtgtgattacagctactgaagatccacaacaaaaaactgtgcttgatttaattgcttcaaaggatcgatatcctgatttggcacctgtaggacgtcttgataaagatactacgggactattgctaattactaatgatggtcagctcaatcataacttgcttagtcccaaaaaacatgttgcaaaaacctattttgttgagttagatcaagaaatagctaatgaagtagatagtgcttttgctaaaggcgtagctttagctgatggtacacaagttggttcagcacagttaattattgataaaagtaataaaaagcaaggtcttattactattcatgaaggtaaattccatcagattaagagaatgtttggattgtttgatttaggtgtggtaaaacttaaacgtataaaaatgggaaatttaagtttagatgaaaatttgccacagggaaaataccgagaattaactgaagcagagatatctgcattaaaagatagttagtacgtgatttttatgttatactttcttttataaaacagcgtagccaagaggagaagttttcatttacagagaacagccattaattctgagaggccagaagacttcgggtagcttggtcagctgatagattgaactaagagtaaatttatccggattagcaccgttatcgctttaagagagagttagtataaattagctctaacttaggtggtaccgcggttaattaatcgtcctagactttagtctaggactttttttatggaggtagaaatgacagatttagcgccaaaatacaaccctaatgaggttgaaaaaggtagatatcaaacttggcttgatgaagacttattcaagccatctggtgataaaaaagctcacccatattcaattgttattccaccaccaaatgttactggtaagcttcatttgggacatgcttgggatacatcaattcaagatactttaattcggttgaagcggatgcaaggctatgacaccctttacttgccagggatggaccacgcaggaattgcaacacaggcaaaggttgaagcaaagttgcgtaagcaaggcttagatcgtcaccaaatgggtcgagaaaagtttgttaagcaagtttgggattggaaagatgaatatgcaaatatcatcaagtctcaatgggcaaaattaggactttctcttgattacagccgtgaacgttttactttagacaagggactttcaaaggctgttagaaaggtttttgttcaactttataacgagggcttaatctaccgtggtcaatatattattaactgggatccaaagcttgaaactgcattaagtgatattgaagttattcacaaagatgacaagggtgccttttaccatattaagtacccatttgttgatggtagtggctttgttgaaattgcaaccactcgtcctgaaactatgtttggtgacgttgcggttgcagttgctcctggggatgaaagatacaaagatttagttggcaaagaattagtcttaccacttgttggtcgtcatattccaattattgaagatcaacacgttgatcctgaatttggtacaggtttagttaagattactccagcccacgatcctaacgacttcttagttggtaaccgtcatgaccttaagcgtattaacgttatgaacgctaatggtactatgaacgaagaatgtggcaagtatactggtatggatcgttttgactgtcgtgaagccttagttaaggatcttgaaaaagaaggttacttaatcaagattgaaccaatcgttcactcagttggtcactctgaacgaagcggtgttcaagttgaaccacgtctttcaactcaatggtttgttaagatgaagccacttgctgaaaaagctcttgaaaatcaaaagactgctggcaagattgattttgttccagaaagatttagccaaacatttgaacaatggatggaaaatgttcatgactgggtaatttctcgtcaattatggtggggacaccgaattccagcttggtacaataaagaaactggcgaaatgtacgttggcgaagaagcacctaaggatattgaaaactggcgtcaagatgaagacgtgcttgatacttggttcagttcggctttatggccattttcaactttaggttggcctgatgaaaatgctgaagatttcaagcgttacttcccaaccaatgccttggttactgggtacgacattatcttcttctgggtatccagaatgattttccaaagtttgcactttactaagcaaaagccatttgaccatgttgttcttcatggcttaattcgtgatgaacaaggtcgtaagatgagtaagtctttgggtaacggtattgacccaatggatgtaattgataaatatggtgctgatgctttacgttggttcttgcttaacggtacagctcctggtcaggacactcgttttagctacactaagatggattctgcttggaacttcattaacaagatttggaacgcttcaagattcgtaattatgaacttacctagcgatgctaaaccagctcatatgccagacgttgctaagtttgatttagcagataagtggatttttgaccgtttgaaccatactgttaaggaagttactcgtttatttgatgaattccaatttggtgaagctggtagagaaatgtacaacttcatttggaacgacttctgtgactggtatattgaaatttctaaggttgcattaaatggcgatgatgaagaattaaaggcaagaaagcaagaaaacttaatctggatcttagaccaaatcttgcgtctcatgcacccaattatgccatttgtaactgaaaagttatggttgtcaatgccacatgaaggtaagagtatctctgttgctagctacccagttgcccacgccgaatttgaaaataatgaagctgacaaccaaatgaacttcatgattgaagttattaaggcagttagaaacattcggatggaagttaatgctccaatgtcaagttcaattgatatcttgattcaacttgataaagccgctgacaagaagattttggatgacaacagtgaatatgttcaaaacttcttacatcctaagaaattagaagtttcaactgaaattgctgcaccaaaattggctaaaactgcagtgattccaggtgctcaaatctttgtcccattagctgatattgttgatttagatgaagaactagctaagatggaaaaagaagctaagcgtcttgaaggcgaagttatgcgtgcaagtaagaaactttcaaatgaaggatttgttaagaatgcacctgaagctgtaattgcaaaggaaaaagaaaaacaagctgattatgaaagtcagcttgaagcagttaaggcccggatgcaagaattaaaagaaagtcgttaatgtgaaaaagtttgataagatatctgaattcttagattatctttatgccttacctaatcttcatcctaaaagtgatttatcttatatcaagcgtgttttagctaagcttgataacccacaagataaggtgaagactatccatattacggggaccaacggtaaggggtcaacttcttattacattagtaatttactcaaaaaggccggtcaaaagactggcctttttgtctcaccttatattaaggagttcaacgaaagaattcagattaatggtaaaaatattccagattctgatttaattaagttagctaaccaggtagttgcagtgattaccgaaattcaaaaagaagaagctgattttaatttagtaacttttgaatttgaagtagttatggcctttttgtattttgcaaagcaaaattgtgattatgcggtgattgaagttggcattggagcaagacgtgacaagactaatgttatagtgccacaagtgagtgttataacaacaattggatttgatcatgaagcaattattggaccaactttagctgatattgctaaagaaaaagctggaattattaaggagaagactccaatagtattaggtaatttgcctgaagaggttttaccgattgttttatctgaggctaagcaaaaaaatgcacctgtatatttatttggacaagattttaagttacacactggatcagtatttgaattaacttcaaaacaaaactatcgttttaatcttcggcctcaagtagagggttatgacattgcacttagtgttaaagtatttgaattgctaaatcttcacttaagtaaagcagaaattgaagcagcaattaatgagacgcaaatcccggggcgttatcaagtattgcaaactaaacctcagattattttagatggagctcacaatattcaagcaattgaaaatttattagcttttgttcgaaaggaaaagacttctggtagagtttatgtcttactagcaatgatgaaagataaagatattaccgaggttttaggcaagtttaaagatgagcaggtattactaacgactttgccatatcctagaacagctaagctagctgattatcacaagttaaatgtaactttgccttttgagcaagactactggcaagcttatctcaatttgaagcaaaaaatgcaatcaaatgatatcctggtagtaacaggatcattttatttggtaagtgccattttgaataaaggagaacaaaaatgaaagttttagggataaatggtgatattaaaggtgtcatttttgatctggatggtttattagttaattcagaaaaattatattggcaggccaatattcaagcagccaaagaagcaaaactggatattccagaagattcatatttaaaattgacaggcgcaacagctaaagatatgcaaaatttttatcacaaatattttgcaacggaagtagaacgtgatgcatttattaagcggacagatgatttggtttggcagtggactgatgaaggtaaattaaaattgcaaaaaggtgttcgtaaagcgcttgatagatttaaaacctcagatttaagaatggcaattgcttcaagtaattataaaaaagtaattgaacatgcgcttgataaaacaggtattgaatcatattttgatttttatttatcttatgatgatgtcgaaaagtttaatttagctcctaaaccagctggcgatatttatagcttggcagctaagaaactgaatttgaataaacaagaagtaataatttttgaagactcatcaactggtattgcagcgactaaagatgcaggtattcaaggaataatgattccagatttgaagagtcctagcttgaaggataaagaaaatgctagtttgatttgtcagagttttttggatttcttagaaaaaattgcttaaacttttgtatataagtaatggaaggagcgatttgatgcagattgcagataaagaccattacttattaaaaacagatcaagaattattaagcgaaatttttattttgcttgaagaagctggaataactagttttgtagagcttaataaatttttattagataagaagttagaaaattttggacaaatttatgattatttgacaagttgtcagattgacgatgaacttttaagtagaacgataactttattaaaaagattaaaagctgttagaactagaaagttgattcaatttgtatctagtcatgaagtaggcaaatacttgatcgatagatttttagggatagagcaagagcaacttgttgttatttatcttgataataaaaataaagttcttggagagcgtttgctttttcaaggaactgttaatcgctctgttgttcatccacgtgacatatttagatgggcagtcttttataatagtgttggtatcttgatagcacataatcatcctagcggtgatactagtccgtcacaaaaagatatcgagtttactaaacaaattgataaagcaagtgatttgatggggattaatttcttagatcatattatagttgctgatcgaagctacttaagctttaaagaagagcaattaatttaaaggttattaaaatcccgttaaatccggccgtttccttgtttaatatgctataatagttcaagatttattgagaccacaattattaaggagagatattcgtgtttggattaggatcaaagaatatcgggattgaccttggtacagctaatacgttagtttatatggaaggtaaaggtatcgttttacgtgaaccttctgttgttgccaagaatacccaaactggtgaagttatttctgttggttcagaagcaaaagaaatgattggtagaacaccaggtactattagagctattcgtccaatgaaggacggagttattgcagattatgatacaactgcagcaatgcttaagtactttatggaaaagactgttggtaattctaagcctgcagttatgatttgtgttccatcaggtgttactgaagttgaaaagcgtgctgtaattgatgctgcacgtgttgctggagctagagaagcatatgtaattgaagaaccttttgcagctgctattggtgctggtcttccagttatggatccaactggttcgatggtagttgatattggtggtggtacgacagatgttgctactatttctttaggaggaattgtatcaagtcgttcaactcgccaagcaggtgataaatttaatagctcaatttcaagttatatccatcaaaagtttaatcttttaattggtgaaagaactgctgaagatattaagattcaaattggatctgcttctgttgaaaaggcaaaagaaattgaatctatgaatattagaggtcgagatttaattactggattgcctaagtctgttgatgttaacgcagttgatgttgcagaagcaattcaagaagtagttcaagatattattgttgcaattaaagaaactctagaagaaacttctcctgaaattgcagctgatgttattgaccacggtattgttttaactggtggtggtgctttacttaagaatctttcagaagttatttcagaagctactaaggttcctgtatttattgctcaagatccacttgactgtgtagccattggtactggtgaatctttaaagaatattgaagtaatgcggagagcacataaataatgaatcggcgaaagccggtttttattttatgaattgaagaattagattaatgaagaagtttttacaaaatagaaagatatttgttagttttttgactaccttgctagttgttattattttggggattacggttagcctgagaagcaagcggaatagtccacttttctttcaaaaaatgggaaacgatattatttcggtagcaagtagaatagtcaattggccagtttctttagcatctggtggcattagtaatattaatagtattattaatatgcaaaaagaaaacgatcatttaaaaagtcaagtatctaacttagctcaaactaaagcacgtaattcaagcttggaagcagaaaataagcaacttaagtcagcccttaatctaaaaaagactttaactacttatactattgttaacgcttcggtaatttctcgttcagctgatacttggtcagatattttggttattgataaaggctcaagtagtggtattaagaaaaatcaggctgttatgtctggtggtggtgtaattgggagaatactagaagtgaattcggctacttcaaaagttgagttgattactactaccgataaatcagctaatagatttagtgttgaagcagattctgcaaatggtaaaaaagttcatggtattattactgttaatagtgatgacacaaattctttgtattttacacaagttgttgacagtaaaaaactcaagaagggcgcaaaagtttatactagtggtttaggtggccgctcacctaaaggtttgttaatcggtactgttgcaaagactactagggattcatttggcttatctgatttgattgaaattaagccagcaggatccattggtgatgcatcagtcgtatctgtaattgaaagaaaggtctcagaataatgaattctagatctaagttctcaagatggtatattgcggttgcagaatttattgccttaatttttgatggagttatcagtatttatgcccattctttattaggtttgagcggaattagtgctagtttttggctaatagttatagctgtagctgcttgtagtttaattgatgaaaataataataatgaaattattttagccttttttatggggttaatagcagatatttattatttaggttttataggaccttatacagtcgggttaacattcgtttcttggctttgtcaaaaagttacgcgtatcttacctgatgtttttgtggttagagttccagtaattgttatttgctacttactttttgatgtgttcttttggttcattttaacaattgcaagcacaatttcaattcctttttctcaagttatatgggggatgattgctaatgctattttagccctaattttggcaagtgttacttatcctatatttaactttttaggaagagaatatccttttgcaataagaatgaattattataaataaaaaggttgttgcaatagcaacaacctttttattaaattacttaaaaaacatttaaaccttgtaatacaggaattaaaatggctaagagagtaattaacgccattaatactgccattacaattgtaagtttttgaaacttagatttctttttacgtgccatgaaaaatcctcctaagcttgtattttagcctagctgggattgttttgcaatttattgataaaattgatagtaggaataaaggagattacaaatgttaatgattatttttctaccaattcttggttttattacagcagcgattgttaatgctgtttttccaaaagcaaaatttcgtgggtatgatgtattgcctttcttctttattgttgcttgtcaaaatatatcaagctttttaaagaatccatctttcttgccatatggttttttaacatattttgttttggtactcgttattagtattagcagggcaattaagtttaaaaatatagattctggaaaattgttccgaaaattatgggattatttaactgtttgtacaattttttggtatattgggttgttattcacaattattatctaaattaatataaatgtttctaattattaaaataaaatccccacaatttgaaataaaattcaacagcgctaaagcttgatttagcgctgtttttgtatgcttaaaaaataattgttaaaaaagtttcacaattatatggaatattgtggtaggaagtggggaattgtggtagattattacttggaagggaggctactatcatgttcatgggtgaatatcatcacaatttggatacgaaaggacgtttgattattcctgccaaatttcgtaaccaaatgggtgataaaattattttcactcgtgggatggaaggctgtatttttggctattctgaagaagaatggaaaaaaatcgaagccaagttagccaaactccccctgactaaacgaaatgtgcgaaagttcacacgtttattttattctggggcaatggaaagcgagtttgataagcaaggtagagttaatttaacaactactttgaaagaacatgctgaattagaaaaagaatgtgtcattgtcggtgtttcaaatcgaattgaaatttggtcacaaagacgatgggatgattttactgatgatgcagatgaaaactacgatgacattgcagaagatttggatgatattgaattatgacaacgaatttcaagcacacaagcgtattactcagggaaacaattgataatttaaatgtaaaagataatggtctttatgttgatgctacttttggtggtggaggacatgctcgttatttattgagtaaacttaataacggtattttggtcggatttgatcaagataattatgcaattaacgctgcaaaagataacttctatgattatttatctgataatcatcaaccacatttaattatggttcacgacaactttagtcatgtaactgaaaacttaaataagttaggctttaatgatggtattgatggtatttattatgatttaggagtttcctccccacaatttgatcaacctgaccgaggcttttcatatagatttgatgctagactagatatgagaatgaatcaggaacaagagcttgatgcctatcaagtagttaattcatattctcaatcccagttagcagatattctttatcaatatggtgatgaaaaattctcgaggcagatagcccgtaaaattgttcaaagaaggcaacaaaaaccaattgaaaccacattcgaattggtcgagcttattaaagaagcaattcccgctgctaaaagaagaacaggtgggcatccagctaaaaagagttttcaagcaattcgcgttgaagtaaatcatgaattagatagcttaaaagcctctttacaagaagcaatcgaactattaaaacctggtggacggattagcgtaattacttttcaatctcatgaagataaaatagttaaaaaaatattcaaacaaaattctgaagtagaggtaccacgtgggataccagtaataccggataatttaaagccgaagttaaagctggtaaatagaaagccaattttggctacagcttcagaattagctgacaacaaccgctcacacagtgctaagttaagagttgcagaaaagttataagaggaaagaaaaatggctgatagttccgcaagaaatttaaattataattatgaacctaatagaaaagcgagaagtacctttgaaacagaaagaagaatgtctgttgatccaaataaggtaccattttctaggttcgagatttttattttagttgctggttctattgttactatcgctatggctgctatgcttgtatttactagtgttgcagcaactagtgcacaacaccaattagccaacattcaaactgagctttcaagtactcaaaccgatacttctaatttgagacaagaaattggcgagcttacttcaagttcaagaatgaataagattgctaagcaagaaggccttagcttaatcgaaagtaatattaggactgttgattaataatgaaaaattcaagtaatataaagacaacaaaaaccaatgttcacagtaaccgatttcaggtagggagagtccttcaggttattgttgctttggtttttcttatttttttagggcgaactttatatattagtatttcaaaaaccgttgctggcgaaaatttatctacaagaacagctgctttatataaaagaaatcaagtacttaaagcaactagaggtacgatttatgaccgcaatggttttactattgcagaagattcacacgtgtatacggtttatgcaatactagatcattcatcaataaattataaaaataagccagaatatgttgttgataaagataaaacagctgaaaagttggctacagttttacctttatccaaagagcaaattttaaaatatttaaatcccaaaactaaggcttttcaagttcaatttggttcaggaggctctaatttaactattgagcaaaaaaagaagattgaacaaatgaaattgccaggaataaaatttattgaagctccctcaagactatatgtaaatggcgtctttgcctctcatattgtggggttggcgcagcctatctataataaaaagacaaaatcaactgatttagttggaacgatgggaattgaagcatattacgataaatatttagctggaaaagatggttttaaagaaagtagtgttgatgcatcagagtatcaattgccaaatggtaccaacgcttatcgagcagctaaaaatggtgatgatatttatttgactctcgatagtcaactgcaaaattacatggaaaatttattaacaagggtccaaaataaatatcagtcgaaagcattgactgcggtagttgaagatttaagaactggaaaagttttggcagcatcgcaacgacttacttttgattcacaaactaaaaagggattaacaagttcatatactgatttattaacacaatcaacttttgaaccaggttcagtttttaaaatattatcttttgcagccgcgattaattctggtcattacaacccaaatgagttatataagtctggttctcttactgtaaatggatcaacaattcacgattggaatgtcacaggctggggttcaattcctttatatgaagcgtttcctcgctcaagtaatgttggattaagtattttagaacaaaaaatgggagcaactacttggcgtagttatttaaataaatttggtattaccaaaaaaacaggaattactttgcctggtgaacaggcaggaatgattgcctttaagagtaaattagatcaggcagtaacttcatttggacaaggggttaacgttaatgtttggcaaatgatgcaagcttatagcattcttgcaaataaaggccaaatggtaaaacctcaacttgttgaaaagatagtatcaccttcaggtaaagtgattcaaaactataaagttcaaaaagttggtaaaaaagttgtttctgaatcgactgttaagactgtcttacaaggtatgcaagatgtcgttaataaacaatatggaacaggaacaacttataaaattgctggaaaaagcatagccgtaaaaactgggacagctcaaatcgccggcccaaatggctatttaacaggaaataataattatatcttttctgtgattggtgttacaccagctaataatccgcattatgcaatttatttaactatgaagcaaccacaaaagatgacagatcctgctgaaacaattttggcttcaatatttaagccaatgatgaatcgacttattctctctagttcagtaactaaaaaagctagtgcaagtaaagaagaagtaccaaatgtaattggtaaatctattactaatgccaaaaatgatattgaaaaagtagctttatctgttgaggtgcttggttctggtgatgtagttactcagcaaactccagctactgggcaaaaacttacagctggaagtaaagtctttgtacttactagtggtaaaattgcagcggctaactttacaaattggacagttgaagaagtgaagcaatatgctgctttggctggaattagtgttaaagtttctggttctgaagatggtaaggtaaagtcccaaaatattaaagtgggcacactgcttaaaagcggacaggaaattataataaaaacaaaataggatatatagaaggagataataatgctatatagcatctatgccttagttattagtatggttataacggcaatttttttgccatggttgattgtttttatgcatatgcatcatgaaggacaaccaattcgagaagaaggacccaaagctcatttgaaaaaagcaggaactcctacaatgggtgggactgttttcgtaatagcttccattattgcatcagttagtgttttagtatggaagcaaagtttcaataacatagcaattattttaataatagccttgttaggacatggtttaattggttttttggatgatggattaaaaataatctggaaaaataatttaggattacgagcatggcagaaattactgctacaaattttaattgctgtagttttagttttaatttccagttttgatcattttggctttgcgttacgtatgccttggggtggagctttaactggacctgtaatttttgtgttatttacaatcttttggttagtcgggttttctaatgcggtcaacttatcagatgggttagatggcctagctagtggtttatcaattattagttttgctacttatgcatacttagcctttaaacaagaaaacttagcaattttagttttttgtatgagtgtgattggagggctaataatctttttagttttcaaccataaacctgctaaaatctttatgggcgatgctggctcgcttgcattaggtggttctcttgcagcaattgcaattttattaaatagaccctggtcattacttttagtgggacttgtattcgtttgtgaaactgcaagtgttatgatgcaagtaactagttttaaattaactcataaaagaatttttaagatgacgccaattcaccaccactttgaactttcaggttggagcgaatggaaagttgacattgtcttttggatagttcaattaatttttagtattttatatttaattatctggggataaaagacatgaaggacattaagacatatcaaggtaaaaacattttagttttaggtttaggtaaaagtgggtttgctgtaagtgaattacttttaaaattaggtgctaaaatcactttaaatgataaacaagatttatctaataatgagcatgcacaaaagttagaaaaaatgggtgttcgagtaattggtggacatcatccaattgaactacttgaaaaagaacattttgatttctttgttaaaaatccgggaattccttatgaaaatcctatggttcaaaaagcatctgaactgaaaattccaattattactgaaccagaaatagcgctaagtgcaagtgaagctccatttgtatgtgtaactggctctaatggtaaaactactacagttatgttgaccagtgaaattattgatcatcatttagctaaaagtggacatcatgcatatgcagttggtaatatcggtgttccaattagtgaagtggttcaaaaagcgaccaaagatgatgtcttagttgtcgaaatttcaagtttccagttacttggtgtaacagatattaagccaaaggttgcagcaattgtagatatttatcctactcaccttgactatcacaagacaatggaaaattatattgctgccaaactgaatgtgacacgtttccaaacaagtgatgagtactttattgctaactttgatcaaaaagaaattttagctcaagaacaagctactactaaggccaaaattcaaacctttagtatgaatgatcattcagctagttactttgttggtgatgaatatttggaatcacaatcagaaaaaattatgaagattgctgatattaagttgccaggtaagcataatttacaaaatagtatggtcgcaatcgcaataagtaaattgatgggcgcagaaaattctgatattcaagcggttctttctacttttgcaggtgcaagacacagattgcaatatgtaactactttaaacaatgtaaaaatttataatgattctaaatcaactaatattgaggctgctacagttgctattaaagcattctcagagccggaagtattaattggtgggggattagaccgaggatttacttttgatcctttggtacctttattgaaagaacatgtcaaagctgttgttttatatggagaaactcgttatttgttagctgatgctgcaagaaaagctggtattaaagaaattaaaattgttaatacattaaaagaagcagtgccaacggcatataaattgactcaacctggagatgtattattactttctcctgcttgtgcatcatgggatcagtttaagacatttgaacaacgtggtgattatttcatggaatacataaaggaattgaattaaaaatgagagttatttttacaggtggtggcactggtggccatatttatccaattttagcaattattgaacgattaaaagaaacaggaatttcaaaaaatgatgaaattttgtttgtaggtacaaaaagaggattggagtctaagattgtacctcatgcaggaattaattttaaaactattgaaattcaaggctttagtcgcaaaaatttaattaaaaatattgaaactgttaagctctttataaaagcaacaaaagaggctaaaaagattatttctaaatttaagccagatgttgttttaggtacaggtggctatgtatcaggggcaattgtttatgaagctgctaaaatggggatccctacattaattcatgagtcaaattcagttgttggactcgctaataagtttttgggacattacgttgataaaatttgttatacatttgatgatgcagcaaagcaatttagcgaaaaagataagttgattcaaacaggtaatccacgttcccaacaagttttaaatttgaatttggagaaaattgatttagcacaaaaatggtctttgaatccacaaatgccgacagtgttagtttttggtggatcaagaggagccctggcgataaatcaagtaatggaagctgcgctttctgagtttcctaaaaagccttaccaagttatttgggcaacagggcaatattattacggttcagtaaaagaaaagttggcaggcaagagaattcctgagaatttgaggattgtaccatatattgataatatgccagctttattaccacaaatgtcttgtgtagtttcaagatctggtgctactagtttagctgagtttactgcgctaggcgttccagttgtgttaattccaagtcctaatgtaactcataatcatcagatgaaaaatgcattggatatggaaaaggctggtgcagcattggtaattcctgaaaacgatttgaattcaaacaattttgtttcttcaattgatcatatcctacttgattcggaatatgcttctaaaatgagtacagcttcaaagaaattaggagttccggattcggcaaatcaaataatttcagttatgaaagctcttcaagcgcaaaaataaaacttatttaagattaatggaggagaacagatgactaataggagaattacaaaaaaagatcctaaaaaggatttggataattttcttgattatacgaaaaataaaactaatattgctaatcgaactaatcataaagcatctgattcactaactaatcttaataatgagagaaaaagtgctttgagacgtcgtttaggtgcaataattgttatttcaattcttgcaattttgggattaggtatttatgtttcatcatatacccgattgcaaagaattattgttgttggcgctccagaattaaatgcaacggaagttataaaaaagtcaggtattaaagctcaagatcaactaattgattattggcttggtaaaaatacctacgaaagtaagctcaaaaagtattatccggaaattaaatctgctaaattaaaaatggctggcctaaatcagattaagctggatttgcaagaatataaaactttggcttatgtaaatcaaaatggtaaatattataaaattctaaataataagaagatagctcggcagaaattgacaaaaatgcaaatcgacaaatctataccaatatttgttagttattcaaataagtcaagtctatttactgatttaaaagcattaaagtcaattcctacgaaattaagaaatcaaattagtataattaatggaagaagtattcgaaagaataaaatagttctgctaatgaaagatggcaatattattattggtaatacagatactattgctcaaaaaattaaatactatccaaaaatcaaaagtactttaaataataaaagtgttattgatttagaaattggagctttttcatatcctttaactgataatgaaaaaaataatctaggtttttaacaagcgtttacataatcttatgtaaaacttcacaaagtttatggtatatttgtattaagaagattcatgggggcgttattgtgagtaattcaagcttaatcgttggtttggatatcggcacagactctgtaaaagcagttgttgccgatgcttcagtcaatgaatttcaagtaattggtgcagtaaaagaaaaaaataaaggaatgcgccaaggtaaaattgttgatattgatcaaactgctaatgcaattgcttcagctttgaaaaatgttgaacaaaaaacaaattcaaaaatttatcgtgtagtaactggaattccagttggtatgcttcagctcgaaacttcaacaggattaattaatattggtgaagatggtcgagaagtaagcgataaagatgtaaagcgagttttggaacttgcaattaagcaagccgtaaaatccggccgagaagctattgcttttttacctagcaagtttttgttagatgggaaaacagatgttgatgatcctcgtaagatgattgcacattcattggaggttcatggaatattgttgacagcaccaacaagtgatttgcacaatattaaaaaagcaattgaacgagcagggtatcaaaataacttctttattcctacaccattggcaatcgctagtgtggcattagatgaaggtgaaagaacatttggttcagtaattttggatataggtggtggaacaacaactgctactgtaatccacgaaaataaaattaaatatgccactatcgatttagaaggtggggaagatgtaactaaggatatttccgtagtccttggaacttctaaaaaagatgcagaacaaataaaacttgattatggttctgctgatccagaattaacatctgcagaagataaattctctgttaaaacagtaggtaaaagtgagcaagcaagtgttgatgaaaattatttaagccaaatcattgcagctagaatggatcaaatattaagcagaattggtaaaggtttatcttctcatgatgcatttaaattacctggtggggtggtaattacaggtggcatgactttgttacaaggattgcaatctactgttgaaaagcattttgaagttaaaacacgtgtttatcaacctgatgagatgggattaagaaatcctgcttatgctgctgcatatggagtagttaactacgtttataatctaagtgatattgatttacttgttaatggtgtaatttatggaacttctgcatctcatgataatccattagctgaatttagtgaaaatagtatcaatatttttaaaagacatgcagaagttagtgaaaataacacaaaagaagcttataatggtactatagtgccacgcgtagatcgtgaaaaagatggtgcaaataagtcagaaaatagtaaaaaaggtatcagaggattctttaagaatttctttgattaaaggtggtttagtaaatggatttccaattcgatcaagacgacaacaaaaatgctgtcatcaaagttattggtgtcggcggtgcaggtggtaatgctgtaaaccgtatgattgatgaaggagtacaaggtgtttctttcatcgttgccaatactgatgttcaagcattaaatagtaataaggcagaaaataagattcaacttggacctaagcttactagaggtttaggtgcaggttcacatcctgaagttggacaaaaagctgctgaagaaagtgaacaaacaattgaagaagcactaaaaggtgctgatatgattttcatcactgcaggtatgggtggtggtacaggaacaggtgctgctcctgtaattgctaaaattgctcgtgaaactggtgcacttaccgttggtgtcgtaacgcgtccgtttacgtttgaaggacctaagcgttcaaagaatgctgcagctggtattgctcaattaaagcaatatgttgatactttagtaatcattgctaataatcgcttattagaaatggttgataagaagacacctatgatggatgcctttaaagaagcagataacgtattacgtcaaggggttcaaggtatttcagacttgattacttcaactgactacgttaatcttgatttcgctgatattaagacagttatggaaaatcaaggctctgctttgatgggaattggtagagcaagcggcgaaaatagaactgttgaggcaacaaaacttgctatatcttcaccattacttgaagtttcaattgatggagcaaaacaagtccttctaaacattacaggtggtccagatttgactttgtttgaagcgcaagatgcttcagaaattgtatctaaggctgctggtgatgatgtagatattatctttggtacctcaatcaatgctaatttaggggatgaagttgtagttactgtaattgcaactggtattgattcaaaggctgaagaagaagcgtcaaaacaattaccagggcatcatactgtaaatcgaccaagagtcgatattaaacctgaaattgaagtaaatcaagctccaccaacacgcactgtagaagctgataattcaacaagtaaggtagaagctactgaaaagccttctgaaaagccacaagtaactgaagaaacacatcaaaaagaatcaatggtaaatccaattgatgtgtggaatttagatgagaataacaatcgccgggaagtaaagaagccagacgtagcaagtaaaaatcaagatacttttgatacatttactagtgatgatcaagatagtatctcgcaaattgagacaagtgctgaaaatggtgataataatgatattccattctttagacaccgtaatcagcaataatgaaaggtgataattatggctgcattagagaaaattagtagttttttcggtatcagtgatagtagtgttgaagacgaatatacttcagaagaaagtacagcttcatcacaaaatgaagtagaagttccaactgaaattgctgatcatttaaacaataaggggagaaacaatgtggtttccattaaatctggtagtatgccacaaagtaaaattgttttatatgagccacgtgtatattcagatgctaaagaagtagcacaaaacttgcttagcaataaggcagttatcattaactttagtagaatggatgatgactcagcacgtagaattgtcgactttattactggtaccgtttatgctttaaatggagaaattcaaagagttggcgataaaattttcttagcaactcctcctaaatttgaaactgatggtaaaattaccgaattggttgaaaaaaaggataaattaagttaatgattagtttcttgttaaatataataagtgtcattaattggcttttatatatctatacaattttaatcgttttaaatgcaattatgagttgggtaccttttctatataattcagtagttggtcgctaccttaataaagttgtggaaccatatgttggcttgtttagaataggattcttaaaaacaattgcaattaaagctggtgtagatatttcacctgtgttagcaatttttgttatttacattattcaaaatttgcttacacagcttgcttttaaattaatttaaaaaatagtgatttaaatcactatttttttatttatatgtaagaataatggataaaaatattttattaagtgaacaaataaaaaagcgtactcagttcctgcgtagtaaaaatgataatgaagatatttcccagttatcaggttatttaatgcaaatatgttatgggaaagaagctgttttaactaattttttagatccgggtgctagagtagatttaagagaacttgctcaatctgacttttatattcaagagtttggaggatatgacaaggctgaaaaatgtcgggtaattatcagtaatgattgggaatataaagatgttgaaaattttcaatttagtttgattaaaattacttataatcataaattcgcttctattacgcacagtcagattttggggactttattaggttcaggactgagccctgcaagcttaggagatattattactgatggaaaaggtaattggcagttttttatttcagatataatgttggattttgtttgccgagaaataacaagaataggtaaagtcgcagtcaggttagataggattcctttaaagcaaattcttaatattgaagatgatgttcaaaatgttaaattagttgtcaattctttgaggatagatgcaatattggctgcccttactagaactagcagaaatattatcaataatcagatagaaaaagaaaatatcaaattaaattggcataaaattaataattctaatataatagtcactgtgaatgatgtgctaagtgtgcgtcattttggaagaatagaaatctcaaatataacaactacacgaaaaggaaagtatcgtttggaggcaaacttgtggctcagcaagaaaaaaagaatgtactaacaccaatggatatacatgataaggaatttacattgcgtgggcgtaaaggttatgaccgatatgaagttgatagctttttagatcaaattgttgatgattatggtgattgcctagataataatgtagatttaaaaaatgaaaatgttgcattaaaggataaagtaaaagagttagaatctgaagtaaatagattagatgaactaagaaaatcaatcaatgacgaagtcttaaaagcacaaaaagatgctagtgaattaagacaaaaagcacaagaagatgctaaaaaaattattgaagatgcaaagaatcaagcagcatctgaaaatcaaagtttggtttatcaaaatgatactttaagaaatgactaccagaggttaaagacccaagttgcagattttagatataaaattcgggcaaagcttcaaaagcaaatagaagctttggatgataatacttggcaatattatcttgacgaagcaactaatgttgaaagaatttatccatcagatggtggtgaaccaatccctatatcatcacttccaacagttgacaataatagccaatctggcgtaaacttggagcatgacaagaggactgatgaagatatttcagaacctagtcaaaaagaagataatcaagaaaacaaaaatgattcagatgtaacaatcgtttttcctgatgattataaagatcataattaatttttttaaacttgatagtaagacaaagaaagaatcagcgagttagtgatggtgtgaggctaacataattttttggagtcgatcaactattgttttagtttaacgttatgcgcgataagcatgttaagtggagcttatgctcaacttaggtggtaccacggttaatctcgtcctaagattaggacgggatttttttgttagaaaggaacaaagtatgagaatcaaagatactcttaatttaggtaaaactaaattcccaatgcgtggtaatttgcctaacagagaaggcgaatggcaaaaagcatgggaagaaaataagttatatgaacaaagattgaagcttaacgaaggcaagcctcgttttgatttacatgatggtcccccatttgccaatggtaacattcacatgggtcactcattgaacaagatttctaaagatattattgttcgttataagaacatgtctggtttttatgcaccatttgttcctggttgggatacacacggtcttccaattgagcaacaacttgccaagcaaggcgttgatcgtaagactatggaccgtgcagaatatcgtgaactctgccgcaagtacgcaatggagcaaattgataagcaaagaactgactttaagcgtcttggagtaatggctgattgggaccatccatacattactttgcaaccaaaatttgaagctgaagaaattagagtcttcggtaaaatgttcgaaaaaggctacatttacaagggccttaagccagtttactggtcaccatctagtgaatcaactttagctgaagcagaagttgaatatcatgatgtaaaatcaccggctatttatgttgccttccaagtagaagatggtaaggggattttagataatgatacttacatggttatctggactactactccatggactattccagttaacgttggtattactgttaatcctaagtttgaatactcagtaatcaaggttgctggtgaagaccgcaagttcgtgattggcactagtcaattagaaaaagttgctgaagatcttgaatggaaggactacgaagtagttgatactttcaagggtactgactttgaccgcatgactgttaagcacccactttacgacaagactagtttagttatgaatgatacttacgttactgcggaagacggtactggtttagttcacaacgctactggttttggtgaagatgactacaatgttggtaagaagtatggccttccagtatactcaccaatggatgaccaaggtcgctacactaaggatattccagatcctaacttagttggtgttttttatgatgatgctaacaagatgattactaagcaacttgaagaaaagaaagccttacttaagttaagcttcttcacccactcatacccacatgactggagaactaagaagccagttatttatcgtgcaactacccaatggtttgcttcagttgatgcatttagagatcaaatcttagctgaaattgaaaaagcaaactttactccaagttggggtaagactcgtctttacaacatgattaaagatcgtggggactgggtaatttctcgtcaaagagcttggggtgtgccacttccaatcttctacgcagaagatggtactccaattgtttctaaagaaacgattgaacacattgcccaaatctttgaaaaagaaggctcaaatgcttggtacactcatactgcagaagaattacttccagcaggctttaagtctgaacactcaccaaatggtaagtttaagaaagaaactgatatcttagatgtttggtttgactcaggttcttcacaccaaggtgttcttgctgttagaccggaacttcattatccagcagacctctaccttgaaggtagtgaccaataccgtggttggttcaactcaagtttaattacttctgttgctgttagtggtcacgcaccatacaagtcagtcttgtcacaaggtttcgttcttgatgataagggacacaagatgagtaagtcccttggtaacgtaatttcacctaatgatgtcattaagcaaatgggtgctgaaattattcgtttatgggttgcttcagctgataccacttcagatgttgctgtttcaaagggtatcttgcaacagaacgctgaaagttatcgtaagattagaaacactttgcgttacatgttagctaatactagtgactttgatcccaagactaaccgtgttgcatacagtgacttgcgttcaattgaccaatacatggaagtgcttcttaataaattagttaaggattgcttagctgcatatgatagatatgactttacaagtgtttacaagatggtcttcaagtttatttcaaatgaactttcagcattttatttggacttcgccaaagatgttctatacattgaaggtgaagactcacttccaagacgagcaatgcaaactgtaatttatgatgctttagttaaattaactaagattatgactccaattttgccacatactatggaagaagcatggggttatttaaaagaagatgaagattacgttcaattgagtgatatgccagaagttgaaacttttgacaatgaagctgaattagtagaaaattggactgaattcatgaaatttagagatgatgtcctaaaggcacttgaagaagcaagaaatgacaagttaattggtaagtcatttgaagcttgcgttgatgtttacccaactgctgaaactaaggcagtatttgataagttaaatactgatatgagacaaatcttgattgtttcaaaacttaacatcttagatggagaagcaccagcagatgctaaagattttgaaactgctaagttagttgttaaacgtgctgaaggtgaagtttgtcaacgttgccgaatgactagaaatgatgttggtgcagatgctcaattaccaacactttgtggtcgttgtgccgaaattgttgaagaaaacttccctgaagaagttaaagaaggactagaagattaatgcgtacaggaactgttaagcaattcgattcagctgccggttttggttttattgatgatgatttaactaaagcttcttactttgttttttatactgcaataaaagaaaatggttataaaagcttagaaatcggacagcgtgtacgttatcaattggcacagggcaaaaaaggtttgcaatgtattaatgtttacattgataatggtgaaggaggatactaatggacttgcgtgaacaagaaatagcctcagaacagatttttaaaggccaaattgtcgatttatctgttagaacaattactttaccaaatgggaaaactgctacaagagaaattgttaagcatcgtcctgcagctgcagctatggcaataaatgcagagaataagatgctgctagttgaacaatggcgcgaaccaatcaaggctttgactttagaaattcctgccgggttaattgatgacacagatgcatcaccacttgatgcaatgaagcgtgaactcaatgaagaaggtggcttgaaagctgaatattgggaaaaggtatctgaattttattcttctgttggcttttcagatgaaaaattgtatctcttctattgtgatactttaactaagttagaagataaaagagatcttgatgatgatgaatttttgactagccattggtatagtttaagtgaattaaagcaacttctatctgaaggtaagattattgatgctaagactatttatgctattactgtctgggaaaatatgattttatcaggtttaaaagaaagtaatgactgaaaaaagagcagattatcaacgaaaacataatgaatctaagtcttttcctttactaactgatttctttagaggaaataaaagaaatcaagaaattaatagtgaaggttatgaagagggaataaatcaagatgtaaatagcccagagtaccaaagaaatcctaaattaactcgtgaagagaagattaatcgactaaaaagaggattgaatatcgcaattgggattgttttaggattattggttttagtctttgtggcattgtttaagttataaataaggagtcaatatgaaaattgctttgatagttccaatgcctgaagaggcagaattttactaccagcattttcatgacagaaaagaagaaatgttcggatgtactaagttcgaacatttttctgttaatgaaaatgaaatttatttaggcttatcaggaattggtaaggtaaatgcagcgatgaatttgaccagtttattggctaaggttgatatcgatttgattattatgactggttctgctggttcactaaaaccagaaattaagaaaaaagatgtaattgtggtcgatagttttgcttaccatgatgcacataataccgctgccggtgattatgttgaagggcagataccacgtgaacctgcaagatttaatttgcaaagtaaggaaagggaacagtttaatagctttttgaaggtaaagaaggtagcatataaagaaggacttgtagttactggagattccttcattgcttcagaagctgcaaaggctgaaattgaagcaaacttcccagaagctgttggtgttgaaatggaaggtgccagttttgcgcaagttgcatatcatttcaagaagccgttaattgctttgagagcaattagtgacaatggagatgaagatgccaatgaaagctttgaagaatttgtcaaagaagccggacaaaaggcagccgatttgattatttcatatcttaagcaataaagattaaaggtggaaattgtggaaagaaagttaatttatttggataatgcggcaacaacgccagtttcagaatcagtggttactgaaatgactaagcaattagccgaaaactttggtaatccttcaagcacacatacttttggccgaaaagccttagaagttgttgatgaggcgcggcatcgaattgctgagtttattaatgccaaaaatgatgacgaaatcatctttacttctggtggtagtgaatcaaataatactgttttgcaaggaattgctaaaaagtatcactatgactgccaaataattactacagcaattgaacacccttcaattttaaatactgttaaggatttgaaagctagcggcgttgatgtagtttacttgccagtagatgaaacaggacatattggtttagctgatttaaaagcagccttaactgaaaaaacggtcctagtttcaacgatggcagtaaataatgaagttggctcaattaatgacttagctaaaattggtcaaattgtccatgagtataatcctaaaatttgttttcatgttgatgcagttcaagggctaggtaacatcgatttagatgttcaagcaatgcaaatcgattttatgtcaaccagtgcgcataaaattaatggccccaagtatattggctttttgtatgaaagaaccggcctaactttaccaagcttgatcactggtggtgaacaagagaagaagcggcgcgctggaactacagatgcgccaagtattgcaggctttggcgaagctattaaaattttacaaggtgttagccgcagcgatgagcaaaaacgctatcaagagtttcaacaaattgtacttgatgctttggacgctaatgaaattaaatatcaagttaatggtagcttaactggcttagtttcacatcatacattgaacttgcatttaattggaatcgggacctatgtcatgctaactaacttggacttggctggatttgcagtttcaggtggctcagcatgtactgccggctctttaacaccatcacatgttttaactgcaatgtatggcgcagattcgccaagaatcgaagaatcgattagaataagttttggtagattaaccaaaaaatcagaagtagaagcattcgctgatgcattagtcaaaatggccaagcgtttgcagaaggcttaagcttgctttatctgagtaagtaacttataatttgtaagtgaggttttaacaatggcaaatactgtaatcattaatggtgataccagaaagtttacaattaatgaaaatgtgaagcgttactctttaattgatgtgggcttcgttaagtcaccaaagggtaattttgtttatgaacaccctttatataatgaatcaccatacaatgcacctaccaagttaaagatgactatcaatcaagatttagatcacttaacaatggtaattactgataagaacggtttgcaaaaagtaaatatttttaaaaatgatcagttaaagccgacagttgatttactcaattttattttgaaagatttgattgagcgagaaattattaaaccactataaaggatgagatttaatggttgataatagcaagattagagttgttgttggtatgagtggaggcgttgattcaagcgtatcagcactcttacttaaagaagcaggctatgacgttgttggtgtctttatgaaaaactgggatgacactgatgatgctggtgtatgtactgctactgaagactatgaagatgtcaagcgagtagctgataagattggtattccatattattcaattaactttgaaaaagagtattggcaacgtgtttttgaatattttttaagcgaatataagaagggtcgcacacctaatcctgatattatgtgcaatactgaaattaagtttaagtcattcctagaatttgcgatgagcttagatgcagattacattgccatggggcactatgccaaaactgttaaggatgctaatggtgtgactcacatgatgcgtccaaaagacggtaataaggatcaaacttatttcttgagtcagttgagccaagaacaaattaagcacgtaatttttccacttgctaatttaactaagccacaagtacgtgaaattgctgaaaaagcagggttagcgacagctaagaagaaagattcaactggtatttgctttattggtgaaagaaacttcaagaagttcttgagtgaattcttaccagctaagccaggtaaaatggtaacccctgatggcaacgttgttggccaacacggcggattaatgtattacaccattggtcagcgtcaaggattaggtttaggttcaactaaagaatcaacagcaccttggtttgttgttggtaaagacttgaagaaaaacgaattgattgttgaacagggctatgacagtccaagactttatgcaactagtttaaaggctagtggaatgtcattttatactggtaatcctgaccacgatgttgaatttgattgcacagctaagtttcgttatcgccaagcagacgttggtgttcatgttaagtatcatgcagcaactaagacttgtgatgtatactttgatgaaccagctcgtgcggtaactcctggtcaagcattagtcttgtacaagggggaagaatgccttggaggtggtaatatcgatgctgcttaccaagaagaaaagcaattacaattagtataattgagagcaatatattaattattatctataattgatatattgctttttcatatccttaaaaaataagtcattatataacattttatactgaaagaggttacaattaaggtgtaataactacattagctagaagaatatttaactgctaatgcaaaaaaattacctcaaacaggtgaaaccaaggcaagttcagcattacttggcttactagggttaggtatgagcattgctttaggattcacaagccgaaaaaaaagaggataaataagacttatttttaaaactcaaaataaaaaatctcacttagtgagatttttttattgatatatttttttagcgatattaaatgctgaccaggctttaggccaacctacataaaacgcaatatgtgtaattaatgtactcatttcttctttagagataccattttcttttgccttttgcatatggtaattaagttgctcaaaggctcccatactgattagggcggttactgtcgcaaaacttcggtctctttggctcaggttgtcatcagaccaaacttcaccaaaaagaacatcatcatttaaatgagcaaatttaggggcgaaatctcctagtaaatctcttcctgcagtttgtttaaccattcttttattccatcctagtctaaattgtcatattcatgtttagataaaggttcataccattcagttggtccctgggtaatggcaagatggctaaaactagaattcttagctgcgccatgccaatgcttaatgccttggttaactacgacaacatcacctggtagtaattttcttggttttttaccccattcctgataccatccttcgccactagtagcaagtaaaatctgaaaaccatcagtatgtgcgtgccagtgattgcggcatcctggttcaaaagttacattagctactgaaaagggaatattagcttgaggattgactaagcggtttaaaaagctcttaccatcaaaatattgtgcaaagtcaatattttcttttccaatcccaaaaatatttgtattatttttcattgatataaccctccataattaagttcacttttattttagaaatcaggagatataatgtaaaatatctatagtaattaaataatcatgcttgaaaggcatagtaatggatacaagggtattaagatattttctaacagttgcgcaaactggcaatataacagaagcggcaaagaagttacatataacacagccgacattaagccggcaacttcaaaaattagagcaagatttaaatcaaactttattagatcgtaagcagaaaggtcatctagttctgactgatgctggaaatttgttagctagaaaagctgagatcttattgcaactgtggtcagatacggttgatgaagttcaaaatagcaatgatgaaattttgggtatattaaaaataggtatagtagaaagtcgatgctctattttggtagaaaaagtaattagagatatgcagaagttatatcctaaacttcaatttgacttctatagtgcatatagcgatgatttaaaaagtgcattagatatgatgcggattgattgtgcaattttgcttgagccagtagagagtaaaaaatactttcaaaagaaaatttctatttatgaaagatgggggattattgttggaaaaagacatccttgggctaaaagaaaagaaatttctccatctgagttaaatgaaacgcaactaataatttctagacgagagattgttaatcaagatttagaatcgagtttgggtactagcctaaattcagaaaatataaaaggatatatcaatttatcttctaatattaattggcttttagagacaggcgaatatgctacactggggattgaaggtgttttaaaggttagacctaatcctaatttggtctttatacctctgactattcagaaaaagacagctcatgtattagtttggagaaaaaatagcagaccttctgctgcaatacaagctttttctgatatgctagaagaaaagataaaacaagtttaagacaattcaggtgataaaatgcaaatttatttcgtaagacatggtaagacagaatggaatttagcttcaaagtttcaaggtggacatggtgattcgccacttttacctgaaagttatgaagatatcaaaaagctaggtaattatttgaaaggaactaagtttagaggaatatatgctagtcctttaaaaagggcttttgataccgctcaaggtgttcaacaaacaatgggtataagtttacctgtgcatgttgaagaacgcttacgtgagtttaatttgggcgatttggaagggatgaagtttgctgatgctgaaaagaagtatcctaaagaaattgatgacttttggaatcatgccgacttatatgatccttcaaagattcatggtgaaacttatcctgaagtaattgcgcgcgggaaagattttgcccaagaaatggctaaactttatcctaataaaaatgataagattcttgctgtcagtcatggcggagccttatgtgcaattatgggtggcttacttggttatccactagccgaaattcgtaagcatggaggattaagtaatactagtttgactattttagagacagatgatgaaggtaagaccttccataaagttgtgtggaatgaaactagttatttaggtagaaaattaggagcaacagattcactataatgagcgataagactgcaaaactctatcaagaaggtaagactcaagaagcaattcaagccttgattaaagatattgatcatgaacctaaaaatgctaataattatttagaactttcaacttatttattagagcaaggggcaattgatcaagccaagaagttactagttcaagcaaaagggttagttaaaaagccacaagatatggattataatttggctatttgctattacatggaaggtgactttgaccgggcattagccttacttgatactattcctaataatgatgagacttattatcaaaaagccttagtttttcataaattaggaaatccgcaaaaagccttggcttttgccatgagcgtttcaaaagtagataatgatcttttagaattattaggggatatttggctttcactaggtgattttgcaagagctagagaaaattatctaaaaattcctaaagatgaaagatcaggaaaattaaactttctaattggtgtaactttatttgggagcaatcgccaagaagcagaacagtattttaccttggctgaaaagattgatccggattattatcaaaccgcaaaaaagcaatatgacagccttttaaaggtagttaagcaaggaaaataaaagtaatggtagaatttacgggacgcttgtcaggcataatttttgaaaacagcgaagatatgtttaaaatcctcgatgttgaaattgttggggagctggcaggctatgatcaagaagatattaaagtaacaggtagttttggggatgtttcaattaattcagaatatcaattttctggagagttaattgtacataaaaggtttggtttacaatttaaagctgaaagttatcaccaagttatgcctcatgaagaaggcagtctgacaaaatatcttagtggggataaattcccgggaattggtcgtaaaacggcccaaacgattattgataaattaggcttaaatgccttacaagttttaaaagaaaatccaaataaattagaggaacttgcattaactcaaaaacaaaaagatagcttgttatctggacttaattcgatggattcatacgccgaaattagcttaaaactaagtcaatatggacttagaaaaaatgtgattaatcgagtttatcatttatatcacggagatagtattgaaaagttagaaaaggatccatatgcattaattaatgaagtatccggttatggctttaaacaggcagattatataggtgaacaattaagaatttcatttactgattctcgaagaattaaaggaggaatatatcaagtacttcttaataatttgcaagaacaaggaaatacttttgttgaattgaagtttttactgactgaagttagtgagttaactgagattccgcaatttgattcaattgcagaagcagtaaatgatttgcaaagagctgaaaaagttgttgttaaagatgatgtaattagcttgcaaaatatttttgaaacagaacaaactattgcccaaaatctagcacgtattaatgataataagtgtgaaagcttttcagatgaaaaactatctcaaattattaaagaatgtgaaaagcacttaaaaattgaatatgatgagacccaaaaatctgctattaaaaaagcacttaatcatcctttgtcgttattaactggtggaccaggtactggaaagacgacaattattaatggtattttgtattgtctaagacgattggaagatattccagcagctagtttatatagtgaagatccaccatttattttagctgcaccaacaggtcgagcagctaagagaatgagtgaaacaacaggtgttgaagctaagactattcaccgtttattagggcttggcattaatagtagtaacagtgatgaagaagttgagttaaatcaaattaatggtgaaattttaatcattgatgaaatgtcgatggttgatatgtttttatttaagcaactactttctagtattgtcgggactaaacgtgtggtttttgttggagataaagatcagctaccttcagttggaccaggaaatgtgtttggtgatatgataactgcctctgcttttccaattacaaaattaactacgattcataggcagggtgatgattcatcgattattacgttagcccacagcattaacgaagatcaaaatacaaacttacttttccaaaaaactaagaattattcatttattccatgtcctcctgcccaagtaggtcgagcaattgaacaaatagtaaattatgctattaaaaaaggctttgccaaagatgatattcaagttttaagtgcgatgtatcatggtactagtggaattaccaatttaaataatttattgcaaaaaattttgaaccccaaagatgaaaatagtaaatttgttgaaagtcatgatgaaaagttcatgattggtgatcgagttttacaattgcaaaataatcctgaaaaagatatttataatggtcaaattggtaaaattattggaatcaatgaaaataaaagtgatgaaatattagtatgcaattttgatgatcgagaagtaaagttttcgcgcaaggatttacttgatttaacaagagcctatgcaattactatccataaatcacaaggatctgaatttccacttgttatcttagtcttaactatgcaaaattttgtgatgttaagaagaaatcttttgtatacagcggttactagggcggcgaagaatttagttttggttggtgaacaaaaagcctttttaatggcagttaatactcctggaaataatcgtaaaactggtttagcaaagaaaattattagtttaatgcccaagcttgaacaaaataagcacaaaccagatagcaatgccaaagacataaatgctaaaagtgatactgaagaaacagaaaataatggagaaaaaatcttaacaaaagaggctatttattctggacaaattgatccaatgattggaatgcaaggaattaagttgaaaaaattagattaattagtctttctttaataattggattccaaacaaaaaatcaactagttttttaactagttgattttttatttactattgataatttttgagctaaattattttttctcgataatcattggtaaaacgagcggtctacgctcagtacgggcatacaagaagtcttgtaaattagcaattattgcctttcgaatatcattttcagaagggcgtggcttcttggccatttgcgtccgcaatacatggtagacgtttttctgtgcttgagaaattaagtcttgtgattcacgcatataaacaaaaccacgacttaaaatatctgggccagctaggacacgttgatgtttataatcaacagttgctactgccacaactaatccttcttcagataaaatctgacgatcgcgaacaacgacgttgccaacatctgcagtaccagaagtatcaacaaaaacatcacccgcaggaatatgaccagcaattcttgaaccttcaggactgaatgctatcacttcaccattacctaaaacaaaggtgttttcctttggaacacctgcatcttgagctaggtgagtgtgaataacttgcattctgtattcaccgtgaactggaatcatatatttcggcttagctaagcgcaccatcatctttaattcttcttggccaccgtgaccagaagtgtggacgttgttgactttgccatgaataacatttgctccagcttccattaacttgttaattaaatggttaacagataaggtgttacccggaattggatttgatgaaaagattactgtatcaccaggttgaatgctaatttgtcggtgagtaccatctgcgattcttgaaagagcagctaatggttctccctgtgatccagtacataaaatcattgcttcacttggctttaagcggttgatttcattagcatcaacaatcaaatctttaggtacgtttaagtaccctaaatcgattccgttttgaatcccattttccatgcttcgaccaaagatagcaatttttcttcccgtttcaattgctgcttcaacagcggttgaaactcgataaaggttagatgcaaatgtcgcaaagataatacgaccatcaattcctttaataatattatttagagatttagcaacaaaacgttcagatttggtaaatgcggatacttctgcattagttgaatctgatagtaatgctaatacaccttcgtcacctaacttggccattctttgaaaatctggagcaggttgattcattaccggggttaagtcaaacttgaaatcaccagtaaaaatcactgcacctaatggggtatgaacagcaattcctaatgtatctggaattgagtgagtagttctgaagaatgtaacagataacttatcaaaatttaaaactgtatcttcatgttcttcatgaagttcagtggtttttaagattccatgttcatccaatttgcccttgattaaagctaaggcaaaaggtgttgcgtaaactggaatttccggaattttttctagtaggaatggaatcccaccaatatggtcttcgtggccatggctgacaaccaaggccttgatttttttacgatttttaacagggtatgaataatcactaattacatagttaatacctagtaaatcatcttcggggaacttaataccacagtccatgatgacaatttcgtcttgatattgaacgcagtacatatttttaccgatttcacctaaacccccaatggcaaaaacagctacttcatctttttttattctaaccattgattacttgtcagtatcaaatgtggtcaacttaaaatcagcatgttctttttcgtatgccaatgagttgccagttaattcttggatgagttcgacattgtagggggtattatcttcaaccatcatccgagcttgaccaatactgtcagcttcaagaaagagtgtcttagtagtttctcttcttgggttaacaatcttgttgtcttggtataaaactttatagatcataaatctatctccttatttagttgttaaaacgatctcaagatgaatattttcaaaaatattcaatagttaataaaattttaccataagttttgcttttagtgtagctatgacatagaaaaaggaggctagttagcctccttttttctatagcaatttaataaaattaagaaattactaatgtatcatcttttaaagcaaatggatcttttttatcaatgcggtcatagaaaagatgtccatttaagtggtcgatttcgtgtgatgcaacaattgctggataaccagttaaacgaattgttttttcttcaccttcaactgtgaagtatttaattgtcagcttatttggacgtggaacatagccatcgataactttatcaacacttaaacagccttcaccttcactcaagcatacttgacgaacagattcagaaacaattttagggtttacaaaagtttctttgaaaattatttcgcctttatcatttggtactaaaagagaagccatttgtacaccttcaccaacttgaggtgcagcaagtccgactccggctcttaattgatgcttttcggcaattttgggatcttgagagttaattaagtattccatcatgtcgtcagctaatttttggtagtgttctgaaagtgggaaggtaagttgatctgcaactcttcttaaaactgggtcgccatctctgacgatatctttcataagaatcatatatattgctccttaaaacatttatttacttatatatttgtaccacatttattagaattctgctcgtaatactttaaaagtattgctaaacattgacccctttacatttaagtggtaaaatctagcaacgtaactaaaaaatgtagacacttcgaaaaaacgtaaattatgatttgcgtgttcatactgtgaccacgtcacagtttttttattgaagctgggaggaatacctttgtcagaacaaagaagagaagatattagaaatattgcgattatcgctcacgttgaccacggtaaaactactttggttaaccaattattgaagcaatcagatactttaccagaacatattaaccttgaagatcgtgcgatggactcaaacgatattgaacgtgaacgtggtattactattttttcaaagaatactgcagttaaatatcatgatacaactatcaatatcttggacacaccaggacacgccgactttggtggtgaagtagaacgtattatgcacatggttgatggtgctcttttattggttgatgcatatgaaggtactatgcctcaaactcgtttcgtacttaaaaaagctttagaagctggtgttaagccaattgttgttatcaacaagattgaccgtcctggtgctcgaccagctgaagttttagatgaagttcttgaattattcattgaacttggtgctaatgatgaacaacttgatttcccagttgtctacgcaagtgcgttaaatggtacctcaagttatgatgaagacttaagtacccaaaaagaaactatggatcctatttttgaaactatcatcaaaaatattccagctccaattgaaaatagtgaccaaccacttcaattccaaattactatgcttgattgggatgactatgtaggtcgtatcggggtaggtcgtgtataccgcggtaagattaaagtcggtgatcaagtaactgttatgaagattgatggtactactcaaaacttccgtgttaccaaattatttggtttctttggtttgaagcgtaacgaaattaaagaagcaaaagcaggggatatcattgctatttcaggtattaacgatatctttgttggtgaaactattgcttcagctgaaaatccagaagctttaccaccacttcacattgatccaccaacacttcaaatggactttgttgctaatgactcaccatttgcaggtcgtgaaggtgaccaagtaactcctaagaagttggaagatcgtttgatgaaacaaacacgtactgatgtttcattgaaggttgaaccaactgatcaaattaactcttggactgtttcaggtcgtggtgaattgcacctttcaatcttagttgaagaattacgtcgtgaaggttttgaaatgcaactttcacgtcctaaggttatttaccgtgaaattgatggtcaaatgtgtgaaccatttgaagcagttcaagttgatactccagatgaatatgttggttcagttattgattcactttcacaaagaaaaggtgaaatgaagaacatggaatcaaccggtaatggtcaaactagacttgaattcttggtaccatcacgtggtttaattggttacaacaacgaattcatgtctcaaactgctggttatggtattttaaaccatacttttgaagcatataaacctgttgttaagaactgggaacctggtagaagaaatggtgctttagtgtcaattaaccaaggacaatcaactacatactcacttcaatcagtagagcaacgtggtatcttgttcattggtgctggtgttgaagtatatgaaggtatgattgtgggtcaatcatcacgtgaacgtgacattgcagttaacgtaaccaagggtaagaacttaactaacacccgtgctgcaggtaaggaccactcagcttctattaagactcctaagacattaactctagaagaagcaatcgaattcttaaatgatgatgaatactgtgaagtaacacctcaaagtattcgtttacgtaagaagattttgaatactaatgaacgtcaaaagttcgataagaagaaaaatcgtcaaaattaattgctaattaatcataaaaagctgttacttcaatagaagtagcagctttttttggtttataataattattaagactaattttaagaggaggacggcgaaggtgcgtccagataaacaaaaatttttatatttagactataaaatattacttccctatttaattttatgtgtagtgggaatagtaatggtttattctgctagctcagatattttgctagttaatggctttaagccaacagtttatggtggcaagcaattaatttactttatagtggctgtaatatttttagggtatccagcttttaatactaaaatgaggaaaattcgaagttggagatttattatgtcctatttaggaatttccgtattcttgttacttattttgttagcgatgaaaataataggtggagcaagatttgctgttaatggtgcggtaggttggattaatttaggttttataagtattcaaccactagaaattgcaaaattagctctgattttatatttagccaagatcttagataaaagggctaatcgcttagtagcaggtaatatttggcattcattatccaatcctacaattattgcatttgctattatggctttagttattgtagaaccagactttggtggtacagctattttatttatgatagtaatggttttatatgcagtttcaggaattagagcaggacttgttctaacttggatgtttattttgttgggactagttattggttttgtatctttaattattgtttggaatccaaagtttttacaaaactcctatcaattccagcgcttactagcatttgcccatccatttcaattggaaaaaacaagtggggcacaattggtaaattcatattatgcaattcataatggtggtttgtttggagtggggttaggtaatagtatgcaaaagcgtggctatttaccagaaccgtataccgattttattatgtcgattattagcgaagaattaggatcaataggtgcttgtctaattttaggtttgctattttacttaatgtggcgaattatggaagttggtgtccatgcccaaagtcaatttaatgctttggtctgttttggagtgacaacaataatatttacggaaactttatttaatattggggcagtaattgggttattaccgattactggagtaacgttaccatttataagttatggtggttcctcaatgtttgtcttaacagctggaattggattagttttaaatatttctgcagaagaaaagcgagccattatgatagaacggagtgtacaatgagttacaatctagatttagaaaatactaatataccagcacgagttgcaataatcgtttttttaaatcaagctcaagaccaatttaagttaagacaattcggagatatcgtttacttttctaaaagaaaaaaatattgtctaatttatgtaaatcaaaatggagctagagagttaacaataaagttaaataagctacactttgttaaaaaggctgaaatttcaccgacaagtgaattggattttagtcgtgagcatgaagaaggacaaattaataaactagcctctgaagcagaacaaattttagaagaaaatgaggaatataagcagtgagaataattgctggtaaatatgctaaaagaaacttgttcacattaaagagtaataaaacaaggccgacaagtgataaggttaaagaatctctttttaatagtttaggacaattttttgatggtggtattactctagacttatatggtggtagtggtgctttagctattgaagctgtatctcgtggattcgatcatgcggtaattacagatattaattatgctgcagttcaaataataaaaaagaatgttgccctaactcatgaagaagaaaagtttgaagtatttaaaatgagtgataaggtagctttaaaattcttacatgagcatgattataagtttgatatggttttcttggatccaccttatgctaaacaaaaaatcactcaaattatgacagaaatagataagttgaatttacttaactcgaaggcaatttttgtttgtgaaactgatgatgatactcaattagcagacgtaaaggggtttaccttaactaaggaacatcatttaggtaaaacaattgtcagaatatatcaaaaggataattaagatggtaaaagcaatttttcctgggagctttgatccagtaactaacggtcatttagaaacaatcaaacaggcaagtaaagcctttgataaagtatttgtggtaataatgactaatacaagtaagaaatatttattttctgcacgagaaagagcagaattagttgaagatgcattagctgatttaaaattagctaatgtttctgttcttactagacctgctactttaacagttgatgttgctaaagagttgcaaactaatattattgttcgcggactaagaaatagtgaagatttcctttatgaacaacaaattagtgctatgaataagaagctcaatccagctattgaaacaatttactttatgacaagtagtgaaaatagttttgtcgcttcgagtatgattaaagaaatcgcaaaatttaatggcgatgtttcgcaatttctaccagaaaaagcagctttggctttgaagagggtgttagggtcaaatgaaaaataaaaagaaattaaatatcatcgttgcaacattactggttcttgttttagtatatttaggactttcttggccaaccaattattatattgaagcgccaggtgatgcaaatagtgtaagtcaatttgtatcttcaaatggtaaaaaagctagcaagaacttatttatggttacggtaagtgagcgacaagctagtttaggggattatctatggagttataccaatccttttgaaaccagaatttcccaaaaagacttactaggaaatcaaaatactagtcagtacatgcaattgcaagaatggtatatggaaactagtcaaaataatgcaatctattatgccgctaaagttgctggaaaaacaccaaaaaagaaattttttggtgtttatgtaatgggcttaactactaattctaaatttagaaataaattaaatataggagatacgattatagcagttgatggccaacattttaagtcaactaaagctttaatggactacattcaaaagcaaaagataggtcaaaaggtttctattacggttcaaagggatgataaatcaattaattattccggaaaaacagttccgctagctacagacaaggcaaaagcagctattggaattcaattagttgaacgcagtaaagttattacaaatcctaaaattaagattaatgctggttctattggaggcccatcagcaggtttaatgttttctttggcctcatatcaattgtttacaggacatgatttaacacatggagttaaggttgcaggaacaggaacaattgataatgaaggaaatgttggtatgataggtggagttgataagaaggtcgtggctgctgataaagcaggagccaaggttttctttgccccaagtcagcaattacctggatataagaaaaatgaaaccaattatgcagtcgctgtaaaaacagctaaaaaaattcattcaaaaatgaaaattattccggttgcaacttttaatgatgcattaacttatttgaaaaaaattcaaaaataaaaaagtctaggaaaaaacctagactttttttgtatttaattttagaaaagaatttttaataagtttgaggtaaaatgatgaattttgaaaaaataaaagattggttgattcagtataaagtatgtgtaattgcggctcttgtaggagttattgtattattttgcttaaaagttaatacaaattctcaagatgagttaatttcaatgaatacagcttcaagtagttccgctagtcagagtagtttgcaagcttcttcagtagctataagtgctagtaatttaaagactaataaagtaacttgtgacatttctggagcagtcaaaaatggtggaatttatactttgaaggcgggagctagagttgctgatctgattcgagcagcaggtggcgaaactgctgaagcagacttaagttccattaatcgggctattcttttgaaagatcaagataaagtttatatacctgttaaaggggaaagcatttctgctaatacagcctctaaccaaggatcatcatcagtaagtaatagtggtggagaaaagattcatttaaattccgcaaccgtagctgatttacaaaaattaaatggagttggtcagaaaaaggcagaacaaattgtagcttatcgtgaacaaaatggaccatttaaaagtgttgaagacttaacaaaagtttctggaattggagaaaagacacttgccggctttaaagatcaacttgaattatagtaaaaaaccaggattttatttactagttgcttttcttttaattagtattagttttttatttttcgaagcaaagtcttattggcatgttggtgtaataggtattttttgtttatttttctcttttttattaatcaaaaagtttaagcatactaagttacttttattagtttttataattatttttagtatacgtttatttcaaagcataccactttactcatatcaaggacaggtcattacaatttatccagatcaagtgaaattaatcccagattatgtttctggaattggaaaatttaaaaatggaaagatcacacttgggtttaaacctacttcggcgataagaaatgcactaagtcaaggagaaaaagttttattatttaatatcaagtatgaagttagtgaaattgagcaagctcataattttggtgagataaattatcggcattattatgctagtaaaggaattaaagaactggttaatattcaaaattatcagtttattagtagtagctatagtctaattgatttttatcattatttgcgatttaaattggaaagatattttactacttttccaaggctacttagtttctttgcgggtgaattgattttaggagaaaacattaatgatgatactcaacaaatattagataattatcgaaatttaggtgtaattcaccttttgagtatttcaggtcttcatgttgggatatacacttttgttatttctgtgatttgttattttttcaaaataactgaagatgagagttttgttattattagtttttgcttgttattgggaatattgctttgcgctggacaagcgggatttgttagaagctgtttaacctactttttaggtggattactaaaaaagaaggcttttaatcttaataattcggacttactaggtttaacagcaattgttcacctattaatcaatccacggttatttatgaatattggggccattttgagttatatattggtcttaggattaaaggttattaagagtgagagtagttttaagcaagggatgttattaaatttactattaacaccacttcttttatttaatttctatcaagtaaatatatttaccgtcttctttaatattttgattgttccttattttaattttgttgtgatgcctttgaccttcattaatatctttttatttaataaatttttatttatctctgatatttttgaaaaaattttagaatttggtgaagcaactataaatagttttgcaagaacaaatatcggaatgataatatttggaaaaataacatggtggcaggttttatttttactaatagtaagtttttgttacttaatttttagattagaaagtcgcaaattaaaattatcgatagttactttgataagtgcatattctttaatttttattagcattcattttccattgcaaggtcaggtaacttttattgatgttggacaaggcgatagtatcttgattactactcctctttttagaaaaagttatttgattgatacaggaggtaaagtttcatttgctagctctaaacggcctaaaagacctcaaatagagcaaataacgttgccttttttaaaagcacaaggaattgatcatttagatggaatttttctttctcatcaagatgccgaccatgttggagatctaggaccattgttagataaaattaaggtaaataagttatatatggctcgaggtctattaaagaatcaagcttttttgaaaagaattgctggaaaagttcataaatcacaaattaaggaattgctggctggggatagagtgaatgaaggaataaagtttgatattgtctatccatatcaagctggattaggtaaaaatgaagattcactatcggtgacttttaaagttaataacaagcgctggctttttactggagacttagaccaggctggtgaagaagtaataggtcagaaaactccaatgaaagttaattactttaagttaggacatcatggaagtaagacatcgtcatctgaacattttttacaaattattcaacctgatttggtttttatttctgcagggcgaaatagtcgctaccatcatcctaatcaggagacgttagcaaagttagataaattggcaataccatatcttagtactcaaagatatggtagtattagttatcgatatggttttggaagagaccactttgaaacttttttgaaataaatttgaggtaagaatgttaatttcattgtttaaaaattcaaatgttcaaaataaaaatttgctaatatatggtgaagatgctttcttaaatgattatttaattagagattatttgaataattcagagtttaagggattagatttgcaaagaatcgactgtgaaaatgatgggttagatgagttattagcttcattaacagaagcaagtttattttcacaacaaaaaataatttgggtgaaaaatcctattttcttgacaggaaaatcacctaaaaaacttcaagcaaatattgcaaaactagaaaaagtctttgccaatttaactttgtctgatgatattgtgattatgcaagctaattatgctaatttagacaaacgaaaaaaaataaccaaattaagtttgtcagcttttaattcggttgaagtacaatttaaaccatatgaagttagtggagtgataaaagcaattattaaggatgaaggctactctattgctcaaaacactttacacttgcttcttgagagaagcgatcaagtaatggatacagcattatccaattatttaaaacttaaactgatagctgatgataataaaaagattactttagaatcagttcaaaataatgtagatttatctcttgcccaaaatattttcgaaatattgtcttccgccttcaagaaaaattatcaagaatcattagaaagactagaagatcagctaagagaaggccaaaatccagttcgtattttgtcagtttttgaaaatcaactagaagtgatcttatctgccaaaattttattagcaagaaagcgtagcgaaatggatattggtaaagaactaggaattcatccgtaccgtgttaagcttgctaaacaaacacaagtatctgtctctaagttaaagagattgttacttgaagcaataaaattagatcaaggctataaaaatgggacctatcaaggcgatgaatttattaagatgtttttattggctatttaaaagtataaaaaaagaccaggaaattaatcctggtctttattgtttgctagaaattacttagcaagcttagctaaacgactcttgtcacggttagccttgttcttgtggattaaacctttagatgcggccttgtccaaagcacgagcagctgccttgtgtaagtcggaggcgttttctgcaccagcagcttgagcaaccttaaacttcttaacagcagttctcaattcgctcaattgtgcagcacgacgcttgttagcgttagcttgagtcttaacacgcttgatagctgatttgatttgtggcatgaaattcacctccaatatttatctaaaatcacataaattgattatacttaagaaaaactatccttgcaaggtaaattatacttgctttttgaaaaaaatatcgttattattaattttgttgtgaaccattaacgctgtttgcacgtttcaccagcggcttacgttgttaatggcgattattttatttatagaaaggtgttattgaaatgtcaatttcaaaagcaagaaaaaacgaattaattaaagaatacgcaactcatgaaggtgatactggttctgttgaagttcaagttgcagttttaactgaagatattaacaacttgaatgcccacttaaaggcccacaagcaagaccaccactcatacgttggtttgcttaagaagattggtcaccgtcgtaacttacttcgttacttagcagaaaacgatattgaacgttaccgtactttaatcaagaagttaggtttacgtcgttaatctattctttaatgagagtcagcatttgctgactctttttttctgctgtcaaaattaccgttctatgctaaaattaaaaaagactagcacgttttgatcaaatgatcctaaataaaaattgtaattatagagaaggaaatattaatggcagattttgatataaagattatggttgtcagcggtgtccgtgaacaaggaaaggacatgttcgctgttcaagttaatgatgaaatttttgttcttgatgcagggttaaaatatcctgatagttctttatttggaattgatgttgtgattccagatatggaattttttgacaaatatagtgataaaattgcgggaatctttttgactcatggtcatgcagattcaattggtgctttgccatatatcttaagagggcatgatatagatatttttggctctgaattaacaattgaattagcaaagttggaagtgcaacgtgaaaatcatcgtcgaaagaatcatcttttccacgtgattgatgcggaaacagaaattgattttagaaatgctagcgtttcattctttcacaccacccactcaattccagattcattaggaattgttgtccatacaccagcaggtggaattgtttatactggtgattttaaatttgatccttctgctagtgagcattatcggacagatatggatcgattagccgaaattgctactaaaggtgttttggcgcttttaagtgattcttctaatgctgaagcagattttcctaatgcttcagaaaaagaaattggcgattacgttagtgaagtgttttctaatgctccaggtagaattattgttgcagctaaagcttccaactttacaagattgcaacaagtctttgatgcagcaaagaagaataatagaaaagtcttgttaacaggtcgaggagtaaataagattgtccaaattgctttaaagcttggctatttacaagctgactctagactttttattcattctaaagaattgaagaattataaagatgatcagttggtagtattagagactggtagaatgggtgaaccattgcagtcacttcaaaaaatggcaactaaccgtcatagaatggtttctattcacccaggggacttagtatttattgctactacgccttcacatgcggtagaaacaatggttgctcaaactagtgatatggtttatcgcgctggtggtactgtaacgcaattagcttatgctaagcacactagtggtcacgccactggtagagatttacaactacttatttcaacattaaagcctaagtttttaattcctgtaattggtgaatatcgcttacttgaaattcatcgcaacttggctatagcgacaggaatgaaaactaaagatatttatataactaaaaatggtgattgcttaagcttacaaaaaggtcgcttttacttaactgatccagttcctggtgaagatacaatgattgacggtagtggtattggtgatgtaggaaatattgttttgcgtgatagagaaattttatctgatgatggaatttttattgcagttgctactattgaccgtaaaaagaaaaagattattgctgaacctagggtaagtagtcgtggtttcgtttatattaaggctaacaaagaattaatgaatgaatcgcgtgaagttatcaaaaaagcaatactaactaattttgaacataaaaagtttgactggtctgaattaaaaacggacgtacgtaacagtttggagaagtttttatacaagcaaactaaccggcggccagttgttttgccagtgattatggaagtaaatcaaaatagacatcgggcaatggctcgaaagaaatccgaacacgaacttagaaataaaaaggcagaaaataatgactaatttaagtcaaaaaaatttaattaatttagctaatgaaagtattgagaataaagatttaactcaagctgaagaatatttggaagaggctttgaatttatcttatgatgaaaatatttcaaaaagcttagttaaggtctatttatcggataacaaagaagatcaggcgtatgatttagtgaaagaagagcctgatcttttttctgattctgaaattttttctttatacttggaaacgttagccaggaataattacttcatagaatttttacaattaaaaaaattattggataatcccaaaataaaagaagttgtccctgaaaagctagaaaagcagatgaaaattatgcaagcttttaaaaagaaaagcgtaataaggcaaaaggattatcaaagtttatttaaattaaatttgacgaattttgttaactttagcaaaagtattttaatagatcctagccagtcatttgcattacgtttagctatttgtgaggacttggtaaagcttaaaatggatgaaaatattccaataatagttttagatcaaatgactgctttcaatccatcattaacaccattattagctaagaatacagtgtatcaagaaattatcagttcaatcggtgatcgattaagtaaaaatccatcgattttgccaactgttttaagtgaaactaatttgctattaggaacaatctatccaaaaatagatgattttgtagatgaacctgattcatttagtaaagatcttgtcaactttgtattagaaagaaatgggggcgaacatcaagagatactaactaaaatctatcaaaatataagtcgttaaagattttaaacaaaatggtttacattttcttgtaatcaggtataatcatataaggatattttcattggcaagagactagtcgaatgcgaatgaaagtagtacaatattcaacagagaattatccgttaacttatctcaacggacttcttgcaaatttacaggagggtcattttaatggcagaaaaagaacattacgaaagaaccaagccgcacgttaacattggtactatcggacacgttgaccacggtaagaccactttaactgcagctattactactgttttggcaaagcaaggcttagcacaagcttctgattactcacaaatcgatgctgcgccagaagaaaaagaacgtggtatcactatcaacactgcccacgttgaatacgaaactgaaaaccgtcactacgcacacatggatgctccaggccacgccgactacatcaagaacatgattaccggtgctgctcaaatggatggtgctatcttagttgttgctgcaactgatggtcctatgccacaaactcgtgaacacatcttacttgctcgtcaggttggtgttgaatacatcgttgtattcttgaacaagtgtgacttagttgacgatccagaattgatcgacttagttgaaatggaagttcgtgacttgttatcagaatacgattaccctggtgacgatgttccagttatccgtggttcagcattgaaggctttacaaggtgacccagaacaagaaaaggttatcttggaacttatgaagactgttgacgaatacatcccaactccagaacgtcaaactgacaagccattcttgatgccagttgaagacgtatttactatcactggtcgtggtactgttgcttcaggccgtatcgaccgtggtcaagttaaggtcggcgatgaagttgaaatcgttggtttaactgatgacgttaagaagtcagttgttactggtttggaaatgttccacaagactttggacttaggtgaagccggcgataacgttggtgtattgcttcgtggtgttgaccgtgatgaagttgttcgtggtcaagttttagcacaaccaggttcaatccaaacccacaagaagtttaagggtcaagtttatgtcttgaagaaggacgaaggtggtcgtcacactccattcttctcagactaccgtcctcaattctacttccacactactgacgtaactggtgctattgaattaccagaaggtactgaaatggttatgcctggtgacaacactgaatttactgttgaattaatcaagccagttgccgtagaaaagggtactaagttcactattcgtgaaggtggacgtactgttggtgccggccaagttactgaaattcttgactaatccaactttaaaaaaatgtacttgctcttgcaagtacattttttttatctaaaatttgatttgtgttttaggctatgtaatactcaataagtttttaagaaaattcctcttaaatttgagttttatcgttatttagggtaagatagttgagtgtgcaatagcaaacccaaatttgacatcggaggtattgaattaaatgtctgcaaaatgggaaaagaccggtaaaactactggtgaattaacttttgaaatttcacaagaagaaattaaattaggtttagatcaagctttcaaccgtattaagaaaaacttgcgtgtacctggttttagaaagggccatgtaagtcgtgttattttcaaccaatactatggtgaagaagcactttatgaagacgctttgaacttagtattgcctaacgcttatactgctgctgttaaggaagcaaaaattgacgcagtaggtcaaccaaagattgaaccagtttcaatggacaaggataaggcttggactatgaaggctacagtttctgttaagcctgaagtagaacttggcgaatacaagggcattgaagttccaaagcaaaacactcgtgtttaccaaaaggacattgacgctgaattagataagaagcgtgaacaaaacgctgaacttgttttaaaggatgacaaggcagctaagggtgacactgttactattgactacaagggtacaattgatggcaaggcctttgatggtggtagcgcagaaaactactcacttgaacttggctcaaatactttcattcctggctttgaagatcaacttgaaggtcataaagcaggagatgaagttgacgttgttgtaaccttcccagaagattacggtgcaaaggacttagctggtaaggaagcacactttgcaactaagttacacgaagttaagtcaaaagaacttcctaagttagatgacgagtttgctaaagacgttgatgattcagttgaaactcttgatgaattaaaagaaaagatcaagaagcaattgaaagaagataaggaagctgcagcacaagacgcaatccaagaagcagcaattactactgcagttaagaatgccaagattgacgaaattcctgatgctatgattcaagaagatgttgatactcaacttaaccaatacttgggtaacatgcaacgtcaaggtattgacccacaaacttacttcaagttaactaatactactgagcaacaattacgtgcacaactttctactgatgctgctgaaagagttaagactaacttagttcttgaagcaattgttgctaaggaagacttgaaggctgacaagaaagaaattgaacaagaaattaaagatcttgcagctgaatacaacatggatgaaaagactgttcgtaacactttgtctgatgacatgctttcacatgatattgctgtacgtaaggcaatggatcttattactgacagtgcaaaacaagttggtaaagcacaacttgaaaaggactctgacaagtaatttttatttcttaaaaagagcggcttttagccgctttttttcttgagagcaaattttagcctttaattgaacttttatgctaatcttagtgttaactataagaggaggaaaaagatggctacaaagtattctgatggagttgacgaaatcacctgttctttttgtggtaagactcaagctcaagtaaagaagatgatagcaggtaatggagtttatatttgtaatgaatgtgttgctctatcaaaagagattattgatgatgaattgaaggccgattcattaaaagaaaccaaagatttgccaaagcctgtagaaattaagaatcagttagatgaatacgtcgttggacaagatcgagcaaaaaaagttctgagtgttgctgtttataaccactataaacgaatcaatcaaatggacattgatgatagtacagaactacaaaaatccaatattgccttgattggaccaactggttctggtaaaacttatttagcccagactttagctaaaattctgaatgttccttttgcaattgctgatgcaaccaccttgactgaagcagggtatgttggtgaagacgttgaaaatattttactaaaattaattcaaaatgctgattatgatattgaaagagctcagagagggattatttacattgacgaaattgataaaatctctaaaaaagctgaaaatgtttcaattactcgtgatgtgtctggtgaaggtgttcaacaagccctgttaaaaatccttgagggaacaattgcttcggtaccacctcagggtggccgtaagcatccacaacaggaattaattaagattgatactaagaatatcttatttatcgttggtggggcttttgacggcatagaaagcattgtaaagtcccgattagggaaaaagacaattggttttggtgcagagagtaaatttgacgacgttgaccaagatgctgatagttggaataaatatttaacaactggtgatttagttaaatttggtttaatccctgaatttataggacgtattccggttatatcaactttggataaattacaaaaggctgatttaatcagaattttaacggaaccaaagaatgctttagtaaagcaatatcagaaattatttagtattgataaagttgacctgcattttagtgatggcgccttggaagcaattagtgaacaggcacttgaacgtaatatgggagcgcgtggtcttagaactatcattgaaaatgcaatgatggacacgatgtatactattccaagtgaacaggatgttgcaaaagttgaaataactcgtgacgtaattactaagcatgcttcgccaagaattactcgcaaagaagttaataaagatgtagaaatggacgatacaaatgaagataacaagtagcgaatatagtgtaagtgctgttcgtgaagatcagtatcctcgtgacgtccttcctgaaatagctcttgcaggccgttctaatgttggaaagtctagtttgataaacagctttcttaatcgaaaaaatctagctagaacgtcctctcagcctggtaagacgcaaacacttaacttctataaagtaaatgatagcttttatttagttgatgttcctggatatggatatgcgaaagtatcaaaaaagcaacgggaacaatttggtgaaatgattcaagattatcttgaaacaagagcaaatcttgaaggcttaattattatcattgatgcgcgtcatgaaccaactacagatgatatagcaatgtataattacgctttattattagatttaccaattttagttgttacaactaaaatggataagttaaaaaagtctcaatataataaagttcaaagtaatttacgtaagcatttagatttaaatcatgataatgtgacagtattgacttatagttcagaaaccaagttgcatcttgcagaattaaataagtggatagaagataaaatttcttagtaaaaaaagagtagcttagctactctttttcattatcaggtttttgtttactattatttttacctttttgtttagctgtcttttttggatcatctgggaaaacagcgaattgattaagcattttttctaattcatcttctcttttaaatgttaaacccattagtatcgctcctttgttttagctgtctttatagtataaaataaacctagagtttgtaaagcaaaaagaaaagagaggattatggaaacaaaacaagcaattgaagatagacatagtgttcgagtatttaccaataaagatgttgaagttaataagttaaaggggttagtcaaactagctcaaaaagctccatcatgggttgatagtcagctctggaaaatttaccttgtaagaggtaaaagtttggcaaagttaaaagagttgcacttaaaaaatagtaagactgatagatctgctgcacctgaatggccaacgatgcatcgagttaactgggatgaatttccaagagacaacatggcaaaacttaatttacatcgaacaaactatttgactaaagatgaattagattcaggctgggcagaggctcaacagaatttatattatgctccagcagtattttatctaactatcccccaaaatagcagtaactggtcaatttacgatttaggtgcttttgcacaaacattgatgcttgcagcaacagatatgggacttggaagtatggttgcttatgaatttgtaaagtatcctgatgaaattagacaaatattacctattccggaaaaagaggcaattgcagtaggaatagctgtaggatatgaagcagaagatcatattaataattttagatctgagcgtctttctttagataatgtgctacaaatttttgactaaaaattaatttttctattttaaataaaaaaaggtaattatagtatattaatacgttttttatattgaactaaattatataaaagagtagtattatatacggccttaaggccagattatatcaaatattcctattgttttgattataatcactcctgaaacttttttattttaaaaagttaaaactcttttttcatgtgtttgttcataataaattgtagaaagatatattcgcctagaatatatcttttttattatatatttaagattttataaaactttaaatatccaatgctgaaagcgctttttgttatataatgaatatataaatagacaaatctctttaggatttgctgatagttttgggaaaagttactattcatttcattattttggaggataaaaaatggcaacatctgaagcacagaaacgtgccaaccagaagtggcgctcgcaacataaagataagcaacaaatttataatcaccgatctactgctaaacgttttatcaaattatatgcaaatttacatgatttagatgttttagctgacatgataaaagaacgacgtagtgaattgaagaagttaggttagtccctaacttcttttttatgtaagaaattagaaatttagaataattgatatcttgctaaaatcaagaaaaaaagtaaaatttaatacttgcatttcaaattaatacatgattaaatatttgataaataaatgagtaataactaaaggcaaaaagacgagtagattaattcattctcacagtgagctaacaattagtgggaagttagcagaccctgaattttttgaaaaacactttttaatgctgcgaggtcgaaatgagtaggctgagacgtaatccccaacgttacctcgggacagatgtgattgcatctgattagagtggtcagtatttgacaagttgggtggtaccgcggaaagagcctttcgtcccttaagaaaattggggatgaaaggctctttttcattctaaatttatattttaggagaaagaattatgaaggtatttgttccagcaggttataagacaaagcgtagtttaagagaaacagaagaagcaattcgtgatattcgagatatctttcagattgaattggcagaaaagttgaacctacttcgggttactgctcctttatttgttaaaaaatcatctggtttcaacgataatttgaatggagttgaaagaccagttgcgtttgaaactaaagaagaacctgatgaagatttgcaaattgttcattcacttgctaaatggaaaagattcgccttgaagcgatatggctttaaaatgggcgaaggtcttttcactaacatgaatgcaattcgtcgagatgaggatacagataatctacattcgatttatgttgatcaatgggattgggaaaaaattatttctaaagaagatcggacaactgagttcttgaagaagactgttaaagatatttattcggcaatgaaaataactggtaagagggttgctaaaaaatatggagatatttttgaatttccggaagatatttattttgtaactagtgaagaattagaagctcgttggcctgaacttactgctaaagaacgcgaagatagaatttgtgaagaacataaagctgtgtttgttatgcatattggtggtaagttaccgttgactggtaaaccacatgaccttcgagcaccagactatgatgattggaaattaaatggtgatttgttattttggaacccggttctaaaatgcgcatttgaagtttcttcaatgggaattagagttgatgaagaagctctgaaacgtcagcttactctaactgatactttagacagattagaattaccattccataaaatgttagtgaatggtgaattgccttacacaattggtggaggaattggtcaatctagattttgtatgcttttactgaaaaaagctcatattggtgaggtacaagttagtgtgtggcctgaagaaactgtaaaagagtgtgaagcaggaggcattcaactactttaatctttggaacatgatataattatttaaaatcatgtttaaggagaacaagatggcaataaagcaagatgtagatttggatattgggttaactactcctgaagttagtaagagaataaagcaaggattagttaatgaggcaactgataatcagtttaagtctaattggcaaattattgccgaaaacacttttacttattttaatttgatttttgcgattttggctggattgttaatagtagttggctcttatcgtgatttgtcttttttacctgttatcattgctaatacgattattgggatagttcaagaaatacgtgccaagcatgttctgtctaaattgacagtaatgaatgaagcagaagttcttgttatccgtgatggaaaaaagatacagcaaccaattgaaaaattagtacaagatgatgttgtcattttaaaaactggagaccaggttccagctgatggtcgcgttttagctggtgaagcgagagtaaatgaagctttgcttacaggtgaggcagatgaaattaagaaaactatcggatcagagttaatgtctggtagcttcttagtttcaggagagatttatatgcaactagaaaaagttggtaatgaatcttatatcgccaagctaatgcttgaggctaaagccatgaaatcagttgaacaaagcgaaatggttcgctccattaacaaaattatcaaatgggttggtatcatcattattcctttggggatagcattgttttctcagagctattttataaatcaagcaggtttagcagatagcattacttctatggaagctgcaattattgggatgattccagaggggttatacttattaactactattgcattagcaatggcagcgacaagactggctcgtagacaggtaatgcttcataatatgaagagtgtagaaaccttagcacgggtaaacgttctttgtgtagataaaactgggacaattactgaaccggttatgtcagtacaaaaagcaattactagtagtaatgtaacaagtagtgatttaaataaatacttagctgacttttctggtaatatgccagttgataatgaaacgatgaaggcagtaagtgaaaaatttaagacgcgcttatttcaaaaagcaaagcagattattccatttacttctgtgaataaatattccgcagctgtttttgaaggctatagtttagtattgggcgctccagaaatggttctaagaactgaatttgaaaaatatcttccagaatttcaatcatatgttgaatcaggatatcgagtagttgtttttggcaaatatccaaaagagctttctgaaagtacgcctttaactgaagctgtagctgtactaggttatattttgataaacaacccaataagaaaggaagcaccagcaacctttaaatattttgctaagcaaggtgttgatatcaaggtaatctcaggggataatccagtaacagtatcaagagttgcaaaagaagcagggattagcaattctgagaaatatgttgatttatcaaagtttgatggtgaatataaagatgcagtaaaagaatatactgtgtttggaagagtgaagccagaccagaagaagaagttaattttagcgcttaaagaagttggtaaaacagtcgcaatgaccggtgatggggttaatgatattttggcaatgaaagaagcagattgttctattgctatggcttctggaaattcagcggcggtacaagcttcacaagtagttctacttgactcaaattttgctaaaatgccagatgtagttaatgaagggcgtagagttgttaataacattgaacgaagtgccagtcttttcttggttaagaatatcttttcatttttgatgtcaataatttcattaatgttgactgtaaattatcctttgcgtccatcacaaataacactgattagtgcttttacgattggtttaccatcatttttactagcattggaaagtaaccataatattattcgtggtaattttattgcaaatgttttatctaaatcgattcctggtgggttaacggatatgctagcggtttgggtattgattgcagctaatatggcgttagatttaggtcatcgagatttatctactacagctaccatggtattgattgcggtaggtatgatggttctataccatatttctgaaccgttaaatcagtttaggctgggagttatggtaatatccttccttacaattcttgtatcaattgcctttttccatcatttctttgcgctaactatgatttcgggaagatcaattttcttattagttgttttgttctttgcagaagtgtcaatctttaggtggttatcagcaatcgcagatgggatggctgaagttggtgcgacattggtacaaaatggtcgtgatactacttttgctcaagtaaaagcggcttataagcgtgggaaaaacgaatagcaaaagtacagtaagtattagaaaaagctactgataaatcgtatcggtaatatcggacgatatcagtagcttttttattttgaaaattattttattaatcttattttcattaggcccctaaaatatggaaataacttaaagcaattcctaaaaacagtacaaataaaattactttagtagaggtcatcttttttctacctaatagccagtaaacaaatgctacaagcaatactggtattagagatggcataatttggtttaaaacagtctgtaattttagagttactttacctgcagaaaagacgaatggaacgtttgctttaattacggttgggattaaggcaccaaccacagttacaccaagcaaaatcgctgagtcagtaactgcatttagctttccttcagcagaattgattaacttttctccttgataataacccattggtaaaattgcaaatctggcaaataaaataaagatatttactaataaccaaataatggcacctagggcatttccttttaagcccatgtatgctccaattgatccacaaatagttggaataattactccaaaaatggtatctccaacacctgcaagtgggcccattaaaccagttttaatacctgcaatagtttcttttgctttgtagccttgatgttcttcaattgctaagtccattccaatgatgaatggacctgtaaatgcatttgtattgaaaaattgcgaatgcattttcatcatatctacaagttcatcatttttataaaactttttcaaaaatggtagaacggtataaaagtatcctggtgccatcattttttcgtagttccaagatagctgactagcccaaagccagcgccagtttgctctgaataaatcttttttagttaatttggtattagtcttcatattcaccctccgcattttcataactcttggtatttacttgcattgtaggtgtgttttcgcgtttataatttaaaatagctagtgccgcaccaagtaaagcaactcctaacattggcatctttaagtaagcggcggctaagaaaccaattattagatatgaaataaactttttagttggcaaataacgtaataaaattgcaataccaacaactggtaaaattccacctgcaactttaagtccatcagttaaccaggttggaacaatccgcaaaatggttttaacgatatcattaccgattaccaataagataaaaactggaatagctcttgataacccccaagtaagaaaacctaaatatgcattacgactagcaatttttgtattgccagctttgattgcttgatccatcttatgttgaaaaatagtattaaagaatcttgctaaaacatcgagttggaccatcaataaaccaacgggtacagctagtccaattgcaaattgagttcctttattggttagtacagcatagactgttcctacaatagctcctgtcataaagtcaggcatgcttgcaccaccgtatgttgaaacacccaaaaccattaattgtagagtagagccgacaattagacctgttttgatatcccccataataattccagaaatcattccaattaagagaggggaattaattgttactaaagtaagttgatctagaatcatccaaaaagctaaggctgttaatagaataatttgccaccatgcaatcattaattttgtcctccattagtcttaagtaaatttataaagtcttcacgtgcctcactaggaatcatttgatgataaattgtcaggccttttttagctaaatatttaaagtcattaatatcatctttagttacagcgacacttttagcaacttgatgtgatccctctttagttgacatattaccaacattaatttcaggtaatttaactcctaaatcaactaattgtttcagaattgaaggcttctttactagaattaaaactgtttgtccaatatattgattattattaattctcttagcagctcctgcagcggttaagatacttaaatgaattccgttggggcaggcagttttaagagctgttttttggatagagcttttgacgatttggtcatcaataaccattagtctggttagttttaaagcgtttgtccacatagtagcaacttgtccatgaattagacgttcatcaattcgaacaaacattgcagtttttcgaggagaatttttagttgaaacattcgtctttattttttcttctgttttctgttcacccaataaaccacttgtttgcgctacttgtttataagcttcggaaaaaggagttccgctggcaacagcaagaagtaatgagaatgataaccccgtatatatttttacttcaggatgctttgcttgaaatcttattgcggtatttgctggagttccacctgtaaaatcaacaaggattgcatctaatttggtgaatgttttcgcaatagcttcaatttcttcaagtaaatcatcttgattcatggtttgcttaaattcaattgcttttacattatttaacttgccaagaatcatttcacaactatttaaagttgccttggcataacttccatgactaattagtaataaattaggcattttttcgcctccaaaatcaatctgctactgattatatactaatagttagaaaaagctaaccaattttgcaattattgtcttaaacctagcattaaattagtgaaaattacatctataccaattttgaaagccttgaagtacaaaggatgtaatcgctttatactaaaaaacggttgagcgagaaaaatgatctttggtacaaaccactttttagtctttttattgctagactggtaaaatgaaaatagctaatttttaaaatttcaataatagacttttacaagcagaggaatagatatgggagaagatagagacttagtttattctgataaagatttagtccaatttttaagtgaaatgggaatatgttcgacagacactttgctagtaaatttaaaattatcagctttaggaattttcccaggaaaagagcaggcacttttttcagcattaaaactactagttaaagatggtaatattgtcttaccaagctttagcttgcatttgaaagagccacgatttaaatcagacctaaaagacaaaattatgaagaagatgccagcatttaatgaggaagcaactcctgtttcagggttagatccattttcagaatatttccgaatgcaaaaaaatgttttacgtgataatcacccaatttattcttttgctgcatggggaaaagataaggaagaaattgtaaagccccatacttttgatttaccttttggaaagcagggagttttggggaggttggaaaaattaaatgcgaaagtggtttgtcttggtactaattttgaaacttgcttagctccgtatctggcagaatctgaaatatcgcgtccactaattcaggaaaaggcaccagtattaattgcgggtgaaaagatttggattagttttaataatgtggagttaaataaatatcatgattatgaagatttaggaactcaatttttgcaaaaatatccagtaaaaattgccaatttacctgccgggcagattttagtttttaatttgcaagagtttgtatgttttgcgcgtgattggtatcaagaaaaggattgcgtccatttacttaatgctggatgggatggaccagaagtttgataaagtgagcgtatctttggacagtgaaaacgaaaacatgatagaataatgatagatatataaaagggtgggctgcttatgacaattattttaacttctatttttgttattttcgttttagtttgtgcatacatcttttcacatcacattattattcaagataatgaataaaaaaatatgattggttaaaaaccaatcatatttttttatttaaaattagcacttagcgctaattcatcaaattttttgaaaaaggcatctttatcagctttagtaactaatgtcattgggcggcctttttctgattcgactaaacgtccggctgcagcaccttctgttagtacatatgattttgccttgcgagtttcaactaaatcaggataaagggctgataaagtagttaaaacatcccataagtaatactgattgccaggctgagaagaaataatcaagctataacctaagccaattaagtccattgctggatagcgtcgtaaactagcaaagtgttgcttaagttcatcatttagtggaatttcttcagtgctttcaaggcctaccatttgaatatcaatatctgaattccagacccgttcgactgcttcgggatcccaaaaagcattccattcttgagtcgtatcatagtagggaacaaatacattaccatgaccatctaaagaaccacccatccaatataatttgtcaattttatttgcaagctttggttcatagtcaagtgctcgagctaaatctgtaataggtccggtcataattacagttgtcctttcatcttgagccataatttttttagccatatcaatatgggcgggatttttggcagctggagtattaatcttgccatgttcattcaaaattggaaaactgttaaaggtaaaggtgctttgtcgccattcttcaggaaattggtggtgggcccgggaattagacatagctacttcaagtttgtggtcgaatgtattaaaacggtcaatgatttttcgacttgcttcgcatgaggcaactacatcaccgtcaccatcaatcgcactgactccaattaaattaatgtcaggtgcttgtaaaagtaaaagtaaagaaactaaatcatctgtatttccatcatggttaaagtaaatgttcttcattttggtaacctttcataaaaaaactactatcattatacatgatagtagttaaaataagaacgctttttgctattttttatttaatgaactgtgtttatagccgtataagaaatagattattattcctaaactaaaccaaattattgccataatataaacatcttcattaagttgggttaataagtacaaacaaattagtccagaaagaattggtaaaacaggatatcctggcattttgtatccgttatttggtaaatcttttctctttctaagcggcaaaataccaaatgaaacaaatgtaaatgctaataaagttccaaagtttactagactggttaattgatcgacagaaaatacaccagcacctaaactaataattattgccactacccacaaactaatttgtgggattttatttttagatgatagtttagctaaagattgtggtaaaaggccatcacgagccattgcataaaccaatcttgaacttgcataaatcatagttagcatcatagtggccattccaactaatgctccaaaagaaagaagctgtgcaatccagtcttgatgagcgaattgcaatgcaaatgctactggattggctacatctagtgacttgtaatgaaccattcctgtaagaacaattgaaactcccatgtaaaatagagtcgcaattaataatgttccaataatcccaagtggcatattcttttgaggatttttaacttcagcagctgaacttgatacacagtcgaaacctaaaaaggcaaaaaatacagtagttgcgccttttattacccctgagaaatgatatggaagaaaaggttgataattagttagtttaataaagtttgcaccaacgataataaataaaataataatagcaatttttacaataactgcaaaattattaatctttgcggaatctttcataccatgagaaagtaaaaaagtaattaataaaacaactataattgcaattatatcaatgtaggttcctttgctagggttaaaagaactaacaaaagcagcaggaagtttaatattaaatggtgctaaaaaggactgaaaatagcttgaccaaccggctgcaactgcggcaacagccaacatatattctaaaattaaggcccaacctaagatccaaccaataatttcaccataaataatatttccatatgagtatgcactcccagcaaccggcatagtagaactaaattctgcatatgacattgcactaagaacacagactaatgcagcaagtaagaatgacagggtcacacctggcccagcataattagcagcaacagttccaggcagaataaaaattccagtcccgataactgcaccaacacctaaagaaattaaatccttagctgttaatgttttactaaatttatgatcttgggctaggtatttattaatgctttcttttctaaaaatattcattgataaacctcacctctgttgaatttataaaagttatcttcacattataacctttaatatttttttaagcaatataatatgtagataaaaaaggataaaccagacatttatccttttactaatctaatttcttgcttttattctttttttataccaatatatgcaagcaattccaaatgctataactagtaatcctgcacataaaattgcgtagtcatcaattattttaacaactatatcccatttagaaccaaagtaaaaaccaagagaggctaaaactgtattccatattaatgagcccaagaaagttaaactaacaaataaagataacttaacttgtgcaattccagcaggaatcgaaattaaacttctgatgattggtacaaacctaccataaaagatagctccttttccgtgcttattgaaccaagctattgttttgctaacgtcatcttctttaaaaccaagtatcttgataaatttattatttaccagtttctttaatcttgcttcagtaaaaagtgaacctacataatataatattaacgctcctagaacacttccgattgttgaagcgagaacaatttcccacaatgcaatttttgtatgcaatgttaaaaatcccccaaaggaaagaattacttcagaagggattgggggaaagatgttttcgagtgcgattaaaaataagattgcccaaaaaccaaactgattgattaagttaatcatccattcagtcataaattttctcctttttctatatctttcttttaattatagggaagtgaaacataaaaagccaatttaaagcagtttcatgctagactagaaaaggtaaaatgtataagggagtgaattttttggcgaatcaacttattgagaataaattaaaattattacctgaacaaccaggttgctatttaatgaagaatattaatggcactgtaatttatgttggtaagtctaaaaatttaaaaaatcgtgttcgatcatattttaaaagtaagcaagttggtcgaagggctgaattagttaaagagattgcagattttgatataattacggtaacttctgacaaagaatcctttttactggaaataaccctaataaaaaaatatcaaccatattataatgttcaattaaaacaaggtactggttatccttatattgaaataactaatgagaaagatccccaaacacggctaacttcaattgtacataaagataatggctattattttggtccgtatccaaatgtgtatgcggcccaagcaacgctacgttttattcaaaaggtttggccacttagacgctgcagtggtcatcaaggcaggccttgtttgtattatcatatgggacaatgtttgggtgcatgttttcaggaagttccacgtagtaaatatgaagctcaaatagctaaaattaaacgttttttaaatggtgatattggtcaagtaaaacaagagttgaccgaaaagatgcaacttgcaagtagtaatttggaatttgaaagagctgctgaaataagagatcagttgagatatattgagcaaaccgttgaaaagcaaaaaatcatttcaaatgatcacacgcaacgtgatatttttaacttttatgttgataagagctggatttcagtacaaattttcttcttaagacaagctaagcttttgcgtagagaaactaaaatgtttcctttgatggatttatcagaacctaaagatgaatttatgtcatttattgtccaattctataatcaaaaaaatcgtattttacctaaagaaattcttgttcctaaaggattagataatgataatttgagtgaagtgcttggcgtaaaggttagaactcctcagcgtgggacaaaacgcgatttgcttaaaatggctaaagataatgctaaactaaaattagatgaaaagtttcgactacttgaactagggaatcgcaagaccaaaggagcacaggcagaaatttttaaggcgttgggattaccatatggctcgattattgaaagttttgaccattctcatatccaaggaacagatccagtttcagcctgtgttgtttttaaagatggtgaaccattcaaaacggcttatcgtaaatataagttaaaaggtgaagtggagcatcaaaatggtgctgatgaagtaggaaatactcgtgaagtagttagacgtcgttatagcagaatgttaaaagagcatactcgcttacctgatctaattttaatggatggtggtcaaatacaagtagatgcgtgtttggatgttttacgtaatgaactaaattgtgatattccagtagcagggatggttaaagataatcatcaccatactaatcatttgattttcggtgatccaattaatggcaagcctttagaattgattccgatgaatccaaaatcagagggcttttacttaatgacaagaattcaggacgaggttcacagatttgcaattacttttcatagacaaacccatgctaaaaattcactttcaagtaagttggatggaattaaaggtattggccctaagagtcgtaataagcttcttaaaaaatttggctccctaaaaaagattaaagatgcctctatcgaagagttacaagacgcaggcctaaccttgccacaagcgcaatctgtgaaattaactttgtagtttttttagaagattttatttaatttattttgtcaatatggtatgtttaattagttgaaattgattttagaaagaagggaaattatgccaacttttgttgatcaaactaaaattgaagttcaagctggtaaaggtggcgatggcatggttgcttttcgccatgaaaaatatgtccccaatggtggacccgctggtggtgatggtggccgaggcggaagtataattttcgttgcagacagtggacttagaaccttaatggattttcgttatcggagaaagtttaaagctgataatggagaaaatggccgtattaaatctcaatatggtcgtggagctaaagatttgtacttaaaggttccagttggtacggttgtaagtgacttctttactggtgaagttattggtgatatgaccaaaaaaggacaagaattagtagttgctaaaggtggtcgaggaggccgtggaaatattcacttcgcaaccagtgttaatactgctcctgaaattgctgaaaatggtgaacctggtgaatttagaactctaaaacttgagcttaaagttttagctgatgttggtttagtaggcttcccatctgtaggtaagtcaacccttctttcagttgttactaaggctaaacctaagattgctgcttatgaatttacaactttaacacctaatttgggaatggttgtattaaatgatggtcgtgacttttcaatggctgaccttcctggcttaattgaaggggctagtcaaggtgtcggtttagggattcagttcttgcgtcatgttgaaagaactaaagttattttacatttagtttcaatggatcctaataatggtcgtgacgcagttgaagattataagattattcgcaaagagttaagcaattatacagctgatttaactaaaaagcgtgaaatcattgtagcttcacaaatggatattcctggtagtgaagaaaagtttactgaatttaaacaaggactagaagatttgcaagttgatgaaccaattttcaaaatttctagtgtaactcatcaaggtcttgaacctttaatgaataaggcagctgatttagtggctgaagttgaagctagtcaagaagtagaagaagtaactactgaagaaaagaactacatgtttaaggcagacactaatgacagctttaaggtcgaacgtatcggtgagcatgaatttgttgttactggtgcaaagattgaacgcttagttcaaaggacaaatattgagcatcaagacggtatcatgcttttagcaagaaagcttaaaaatatgggtgttgatgatgcacttagagctaaaggtgcagtcgatggggatgacgtaacaatcggcgacatttcctttgaatttgtccaataaaaaaggagattggaaaggatgcagcgaaaaaatcgctttattaaggggtattcaggccttcgggcattagcagttattggggttattttgtatcattttgatcctaatacctttattggtggatatcttggtgtaccgatttttttcgtattatccggatatttggtaactgaccatattttagctagttacgaggaaacaggttattacgataataaacgtttttacttatctagattaaaaagactatatccgcaattagttaccgtactgtgggcaagtggtgcttatatgctaatgtttcagcaacaaactcttgccaagttcaatcaaatcgtcactacaaatttatttaatgtctataatttttggcagattgccaatggacaaagttactttgaacgatttgcagggaacgtttctccatttactcatctttggacaatgtcaattgaagggcaattttatatattttggccattaataatgatggtgctaatcaagttttgtaaaactagatatcgtgcattttggattattattggctttagtattttatctgccttggaaatggcaatcttatatcaaccaaatgttgatacaagtagaatttactatggaacagatacaagattttttgccctgggattaggtgctgccttagcctttgtttggccaattaagcatcttaagcgtgaaattaataaaactgattggataattcttgatattacgggtacagtatctttaattggaatgctttggctttttttatcaagaattatggatccacaagccgcttttgcctatcgcggtgggatgtttttatttagtttatttactacaatttttgttgcgattatcgctcatccagcaagtcactggaatcagatttttactaatcgaatttttgattggataggtagtagaagctatgcaatatacttgtaccaatttcctgttatgatcttttttgaagcaaaatttacagatatggctaatcatgcctttttgtatcacttaattgaacttattttgattttgggcttagcagagttgacttatcactttattgagaaacctttttctaagattagttttgaaagtattcgggtctttatagctcactttaaagattcagaaaagaatggtcatttaagaatcgctagtggagtttctgttttaattttaatattaggtacaattgcagtgataaaagcaccagatgttaaaggggtaaatgcaaataaatcacaacttgccgaaagaattaagaagaacagggcaagccagaaaaaatctaataagcaactgattgataagttcaaaaagacaaagaaaaaagaaaacaagtcaaaagcatttattgaagcgcaacagtcggcaaaaaataaaccagtcaataaggactttgaaaaatatgggatcagtcaaattgacttgcaactggcacaaaagattcacgttacagcaattggtgattcagtaatggcaggggcaagtgatatgttaaaaaagttaatgcctaacgctttaattgatgctgccgtttctagacaactagtcccaactattggcttgttcaatcaatataaaaatcaaggagctcttgctgaaaatgtcttaattggactcggaactaatggtccattctcaatggatgatattaatcatttaatggagataattggccctaatcgtcaagtcttttggattagtgtccatgttccaagtagacaatggcagggccaagttaatgaactaattttaagagctagtcaaaaatataaaaatctatcagtaattgattggtatagttatagtgcaaatcataataactggttttatggcgatcaaacgcaccctaatgttgaaggatcgaaatactatagtacttatataacaaaagaaatattgaaaaaggcgaagttttagataggggaatgattaatggaaattcaatttttaggaactggagctgggcagccttcaaagcagcgaaatgtttctagtttagctttgaagttacttgatgagctgaatgaaatttggttatttgatgttggagaagcaacacagcatcaaattttacggaccaatatccggccaagaaaaattactaaaatttttatttcccataatcatggtgatcacatttttggcttacctggtttactatcaacaagatcttttcaaggggaggtggggcctttaacaatttatggccctgcaggccttgaacagtttgtaacaaccgctttacgcatatctaaaactaaagttagttatccaattcattttgtagaattgaaagatgaccaaaagatttttgaaaattcagagttttccgtatattgtaaaaaattagaccaccgcgttgctagttttggctttcgtgtggtagaaaaatcacatcctggtgtattattaatggataaattggctccttatcatctacctaatggtccaattttgggacaattaaaagctggaaaagtggtagagttagaagatggaagggtcttaaatgggaaagactttttgggacctgaaaaaaagggtagaattgttacaattatttacgatacacgtattaccccttcgattgctgaattagcgcaggatgctgatgttttagttcatgaatcgacttttgccggaccagaagggaaaatggctaaagcatattatcattcgacagctacgcaagctgctgaaatagcaaaaaaagccaatgttaagcgtttgttcttgacgcatgtgtcagcacgttatttgggagctaaggcgcacattttggaaaagcaagctcagaaagtattccctaatactgtgttagtaaatgatttagatgtttttgatattccaatgagaggataaatcatgagtaattcattacgcaataaagttgttgttattactggagcatcaagtggattgggacgctcaattgctttgcaatctgctgaaagaggagctaatttaattttaattgctcgtcgtgaagaaaaattattagaagtagcggctgaagctaaagaattatcaggagctgaagtttgggtttatccaactgatatgggaaaagccaatcaaattgaagatactttcaaaaaaattatcgtcgcagttaagcatattgattttttggtaaatgcagctggttttggtgattttgatgatttctttgaccaaaatccgcaacttataactaatatgttccaagtgaatgttttagggttaatttactttacaagattaatcgctcgagtaatgattgatcaaaaatcaggtcaggtaattaattttggttcaatggctggtaaaattcctacaacaaaatctgcagtttatagttctactaaggctgcggttattcaattctcaaacgttttaagattagaacttaaaccatttggcgtaaaagtaatgactgtaaatccaggtcctgtttatactaatttctttaatcgggcagatcatactggtgattatgttcataatgtacaatcatttatgttagatcctgatgatgttgcttggcaggttattcactatttcggtagtgataaacgagaacttaaccttccattatcgttagcagtaatggcaaagctttataatttattcccagctgctggcgattatttatcattgattttgggatctagaaagtagtaagtatgaataaacaaaagaatttagttattggattagcagtaagtttattattaattattttcgttttattaaatacagaaccagttaccattaatttcttagttgttaagccgaaactgccattaattgtggttttagttattatggcttttctaggtgctttagtatcttggttaatgggagaaaagagccatgaagaacaaaagcgttcttgggggctttttaagaaaaaaaccaacaagaagattaatgaataaacttgatttatacgtcatctaatagtattattgaaatacgtgagtaacgaagtctgatttttaattggactttttcagtctcaaactacaaaaaaggagatttaacgaatggcagttcctgcaagaaaaacttcaaaacaaaagaaacgttcacgtcgtggtcatattaagttaactgtacctgcaatgcactatgatgcaactacaggtgaataccgcttaagccaccgtgtttcaccaaacggttactacaagggtcgtcaagttgttaaaaaagctaacaacaacgactaactaatagacacctaatttgcggtgtctttttttttacaaaaaaacatagaggaaagtatttttgaaaaatgaaactagtttttttacatactagcgatacgcatggatttttattaccaacagattatcaagataagcatgattatgaagcgccaattagcttaagtagagtttcaacagcgattaaagcgcaacgagaaaaatggggtgctgataaagtagtagttaccgatgcaggtgattgcttgcaaggttctccattggccagtttttgtcataaagatgaaagttacgagcggcttgataattttactgcagcttataatgaaattggttatgatggacgctgtttgggaaatcatgatttcaactttggtcaagattatttgaagcactatattaagaagaatactgctagttttgtcaatgacaatattcttgatgaaaagacagataatccagcttttggtcaagaatacaaaattattgaacgccaagatatcaaaattggcttattaggaataacaacgcaatatgttcctcactgggaaccagaggaacacattcgtggtctaaaatttgtttctgcttttgatcaaataaagaagttagcgcctaaattgaaaaaagatgtcgacattttagctgtaatgtatcatggtggttttgaaagtgacccagttactggagtagctactgaaccgcataatggcgaaaatgaaggctataaaatcttaaaggaaattccagaagttgatgtatttttgactgggcaccaacatcgtcgattaaacttagttgttgataatactgcgattgttcaaccaggttatcgtggtgaatgtgttgctcaggtagtaatcgacttagataaaactagtgatggtattaaaattaatagtttagaaactagtttgattgaaactaaggattacgaaccagatccagccattgtaaaagatataacggatgttgatcgacaagcacaagcttggcttgaccagccaattgcccatttatctgaacctgcaccaattaaaagtgcttttgagggtagaactaaaggagcaccttttataaatctgcttcaacaaatgcaaatttactttactggagctgatatttcagctactgcagttatgagtgaaaaggctcgtggatttactaatcaaacagtaactttgagagaagttattttgaattatccttatgctaatcaactttgcaaggtaagattaactggtaaagagttaaaagaaattttagaacatactgctactttccttgaaaaagataacgaaggaaatattaattttattgatcgatatattaaacccaagccacagttgtatcacttcgatgtcttttatccattacgttatgaagttgacttatctaagccacatgggcatagagtagtagaattgactttacatggaaaaccaatcgaagatgaacatatttatcatttggcagtaaataattatcgggctatgggtggaggcttttatccagcatattcaatggataaaattgaaatgatgcttgataaggattatgtccaaatgtttactgaatacttgactagtggcgaagttaaggtagatactaagcaatactacaagttttattagaaaaaagatcactttaaagtggtcttttttgctttttcgaaaatgcttacatgataataattaagttgacgttatgagcaggattttataaggagaaagcttatgaagagagtaacattatttaatcataaacatccatttattactcctgcaattatattttggagtatagttttcttaatgtttttcggacccaagattttaacctcgattaaatcagcatattttaactatcaaattactcaagtggtttcagaaaagaaaccacaagccaaagcactggatatagtgcaagaagatactgaaaccaatgtttattatcaaacatatgaatataatgataggaaatatatccttgcttgcttcaagaaatctgggaaaagacactttgactggtacagtttaaaaactggaaagattgaacatctaaagtaggtataactatgaaaaactttggacaaaagcaccctttgatggtgtggattttaacacttttattcaatttgctgattttagttggtatttatttaagttatttgtcttttcaagaagagcatgatacgaaggttgcctatgcagaaattgaattagctttgaaaaaacaaaatattaatactcatgaaataaaagttgccaagccatttgttaggaatcaaagggcttttaccaatactatctggtacacactagcctttactttcaaaggtcaaaaatatgaagcaacttattgagaagaacttattgataaaattataacgaaagattgggcaattcgttataaaccagaatatcgagtaaagattgaaaaagttaaagagtttcaataaaaataaaaggaggcgtagttattctacgtctcctattttttatattcaataattataacatcttgctgtacttggttttacccttgtatgatttagccgcgatgaaaggaataataacagcaaataacaaaccaaatacaattcctacacgaattgcttgcattgggttaaattgcgtttcagtcaatgctgcagcaataaaaccaatgattgacataaaaatagtactccaaattgctgaaataatgtagcgcataatctctccttctttcgctttgcattttatcaaattttgaaattgtaaacaaggaaatgatacataatatgagtttttggtatacttaaaataaatgaaaggggcctcgtgatgcaagtttctggtttacaaactttaagttctttttcactacttaaaagtcctattttagttgatgaattagtgaaagacgctgtagataaagggtatagtagtttagctttaacagatataaatgttacgtatggtttggttgatttttacttagctgccaaaaaagccaacttgaacccgttacttggtatgactatcaggcttaatggtatgatagaccaagcccatcgctatgacttaatttcaattgccaaaaataatgagggttataagaatttgttgcgcttatcaagtgcaatcaacttaaaaacagataatggtgatgagcgaaaagttttaactttaaagcaagttgccaaatatttgagtgatcagatttttatcattccagctaatgtgactagcgagttgcgatacttatctgaaaataatgaaaagcttggtagtgactaccttcgtgaattgcaaaaaatcattccaagttctagcgatttatatttaggagtatatgccagcaaaaatcagccatatatcaactatgttaaggctttagcagcgcagttcaatttaccattagcagctgctgaagatgtccagtatttgcaagctagtgatcagtttttggtaaaaacattgagagctattgaacaaggtcaaaaactagttgatacttctagtttagccttacaaaaagggtctcattatttacgctcaagtggtgaattagttgctgcatataatgaaaatgggattattgaagccttgcataatgctgcaaagatagcagatgaatgtaaagcagaggttattttcacgcagccagaattacctagatacagacaaaactttgcccctagctcaaaaatatatttacgccagttagttcaaaaaggccttgaaaatcgttttaagggtcaaaatatcccagagatttatcaaaaacgtctagattatgaattaaaaattattaatcagatgggatttgatgattactttctgattgtttgggatgtaattaattatgcccattctgttgatattactactggtcctgggcgtggttcagcggcaggttcattagttgcatatagtttagcaattacagaagttgatccaattaaatataatttactctttgaaagatttctaaatcccgctcgggctcagatgccagatattgaccttgatattccagataatcgtcgtgatgaaattattaagtatatgtttgaaaagtatggaatggatcatgctgctcagatattgaccttcggaacattggcggctaaacaagctttgcgtgattgtgctcgtgtatttggcttaacaacagttcaagcaagtaaatttactcatgcaattccattttcaaaagtaaaaattaccttatctcaggcttatcaagaatcaaaagctcttcagctactggtaaatgcttcagaactaaataaattgctatttagaactgctatgcgtttagaaggaattccacgtcatgcctcaattcatgcagctgggctagtaattagtgataaatctattgctcagattgctggtttacaagctgggactttagggattccagttacacaacaaactaaagcccatgttgaagagttagggttactgaagattgactttttgggcttgagaaatctaactattttaggtgagacagtagagttacttgctaaagatggcataaagcttgatccaaaacagattccccttaatgatgctaaaactttacaattatttcaaaagggacaaaccgacgctgtattccaatttgaatcacaaggaattaaaaatgtcctaaaaagattgcatccagatagctttgaagatgttgttgctgttaatgctttatatcgtccaggccctattcaaaatatcgatcatttcattaatcggaaacagggtaaagaagcaattacttatccagattcatctttggcccaacttttaaaaccaacttatggaattttggtttatcaagagcaagttatgcaaactgctcagattatggcaggttttagcttgggtgaggcggatttattgcgtagagctatgtcgaagaaaaagcaagatttaattgaccaagaacgtgagaaatttattactggtgcagtaaagaacggccatccgcaagctacagctagcaaggtatatgcctatattgagcagtttgctaattatggatttaatcgttcacatgcagtagcgtattcaaaaattgctttttggcttgcttacttaaaagttcattatccagctgccttttttacagcgctactaaattcagttagtgctaatcgaataaaggcaggagaatatattacccaggcccaagaagttggtgtaaaaatcttgccaccagatattaatcaaagtcagactgactatagtttactaaacggccaaattcaggttggacttaaggcaatcaaaggaataagagttgatttcttaaaaaatattgcaaatttacctaaaaattttagttctttagcagattttctgagaaaaatagatgccaaatttctttcagaacaaacaattgcagcaatgattaaagcgggttgctttgataaaattgataaaaatcggaaaatgttgttactcaactgcaaagagattgtagaaaatataaaatttactggtcaaaatgaaaccttgtctgaaggtttaggtggaattcgtttagaacaagctccagctcctaacgctaatgaaaaagcaacaatggaagaagaagtgctaggcttttctacaactaaaacaccaattttagttgttcaaaaatatgctgaaagattcaatgcccaaactttgaattcatttacggtaaatgaaacagggattgctgttggaaaattaattaaattgaagcttattagaactaaaaaaggcgatactatggctttttcaacttttagggatgcaagtagtgaacaagaaatcacaatttttccgggaatttacagtaaaatatcagatattttgaaagaaggacaaatttatcttcttggtattaaaactcaaagtgatcgatatgatgctggaaaagtccaatatatgttgaccaatttaaaacttgtcaattttactgaataaattcaaattcaataaatcacaatttaccggcaatggtaccgctaacaaatgtaaaaaagagaatagaatactaatttagcccatttttttaaagactttgagtgaaaaaaatggtagtatttaattgatgtgagaaattacacataataatcatgatggggtgaattcatgaaacggattggtattttaacaagtggtggggatgcccctggtatgaacgctgctgttcgtgcggttgcaagaactgcgatggctaatggcatcgaagtttttggtattcgttacggatttgctggtttagtagctggtgacatcttcccaatgacatctgattcagttgccaatatcttaactcgtggtggtaccttcctttacacagctcgttatccagagtttgcgcaagaagaaggccaattgcgtggtattgaacaattgaagaagcatggtattgaagcattagtagttatcggtggtgatggttcttaccatggtgccttggccttgactaagagaggatttaactctattggtcttccaggtaccattgacaatgacattccattcactgatttaactatcggttttgatactgcctgcactacagcagctgatgcaattgataaaatcagagatactgcaagcagtcaccaacgtgtattcgtaattaatgttatgggtcgtgattgtggtgatattgccatgcgtgttggtgtggcaagtggtgctgatgctatcgttgttccagaaaagccatatagcattgaagctattgctaataagctcaagaagagttttgctaatggtaaagatcatggtattgtcattgttgcagaaggcgtaatgtcttcagacgacttcttgaaggaacttcttaagtatggtgacttcgatgctcgtactgaagttttgggtcatatgcaacgtggtggtgaaccaactgttagtgaccgtgtcttggcaagtaagatgggttcatatgctgttaagcttcttatggaaggaaaaggtggcttagctgtaggtatcgaagacaatcacttgtgtactcatgacattgttgatttgtttgattcacaccatgttggtgattactcattgcttgcaatgaatgatgatttgtcacggtaaattttgtttttgtaataggagagttttttaaatgaagaaaactaagattgttagtactttaggtcctgcatcaaacgatttagaaactattattaagttaattgaagcaggtgcaaatgttttccgtttcaacttctcacacggtgatcacgaagaacacctttcacgtatgaagttggttagagaagctgaaaagaagaccggcaagttagttggtattatgcttgacaccaagggtgctgaaatcagaactaccgaacaagaagaaggcaagttcactatccacactggtgaaactatgcgtatttctatggatgctaccaagaagggtaacaaggacaagatttacgtaacttacccaggtctttacgatgacgctcacgttggtggtcacgtattaatcgatgatggtaaggttgacttattaatcactgaaaaggatgaagcaaacaaggaattagtaaccaaggctcaaaacactggtttaattggttcaaagaagggtgttaacgcaccaggtgttgaaatccgcctcccaggtatcactgaaaaggatactgatgacattaacttcggtttacaacacggtattaacttcatttctgcttcatttgtacgtaaggctcaagatgttttagacattcgtcaattatgtgaaaacgctggccaagaccacgttaagatcttccctaagattgaatcacaagaaggtatcgacaacattgattcaattcttcaagtttctgatggtttaatggttgctcgtggtgacatgggtgttgaaatcccattcatgaacgtaccattcgtacaaaagactttgatcaagaaggcaaatgcattaggtaagccagttattactgcaactcaaatgcttgactcaatgcaagaaaacccacgtccaactcgtgccgaagtaactgacgttgctaacgctgttttagacggtactgatgcaactatgctttcaggtgaatctgcaaacggtttgtacccagtacaatctgtacaagcaatgcacgacattgatgtacgtactgaaaagcaaattgctgaacgtaacactttagcacttcaaagatttgaagaataccaaggctcaaacgtaactgaagctatcggtgaatcagttgtaagaactgctgaagaattaggtgttaagactatcattactgcaacccaatcaggttacactgcaagaatgatttctaagtaccgtccaaacgcagatatcgttgctttaactttcgatgaaaagattcaacactcacttggtattgtttggggtgttcaaccacttcttactgaaaagccaacttcaactgatgatatgtttgaaaaggctgctaagcttgctaaggaaaacggctttgttaaggatggcgacttagtaatcatcgttgctggtgttccagttggtgaatctggtactactaacttaatgaagcttgaacttatcggttcaaagcttgttaagggtcttggtgtaggtactggctcagttattggtaaagctgttgtagcaaacagtgctgatgaagcaaacaacaaagtagaagacggtgacattttagttgctaagactactgacaaggattacttacctgcaattaagaaggcaagtggtttagtagttgaagcttctggcttgacttcacacgctgctgttgttggtctttcattaggtatcccagttgttgttggtgctactgatgcaactgacaagattgctgacaacactactattactattgatgctcgtcgtggtgctgtataccaaggtgaagcagctaacttataatagctagttaatataaaaaataaaagtagtctgattttttcaggctacttttattttttgtctaaattctttatactatagaattagattatgtaaagtaatattaataaagagaggaggcctcgtatgttagggacaattcaaaaaggtaaagttatcgataaaaatgacgaggcatattatgttcaagtagatggggtgacttatgaacttaataaattagaagttactcaagaacaaatgccacaattaggtgatattgtacaaggctttatttatgataataaaaatcataaaaagcagatgactcagttttatccttttgcgatgcctgatcaatatggttggagtaaagttaccgaaattagacgtgacttaggggtgtttgttgatattggtttaccagataaagatatggtaatttctttagatgatttacctcttgataaagcaaaatggcctagaattggagatcgactcttagttactttggaaacggatcataaggatcgtatttgggctaaattagctgatgaaaatgtttttgaacagctttcaagtaagtttcctcaaaatatgaaaaataaaaatttgttggttactgtctatgcaactcgtcctgttggcgcatttgttttaacaagtgatttttatttaggatttattcatgaaagtcaaatgatgactcctctacgattaggagaacagattaaagctcgagtagtgggaattagtaaatatggtcgtttaaacttaagtgtcttaccgagagcttttgaagaaattgatgaagacagtcaaatgattttgatgtcacttagacgtgaggcaactaagtctttacctttctatgataaaagtgatgcacaagacattaaaactcatttcggtatttcgaagtcagcttttaagagagcaattggtagattacttaagcaagacttgattattgaagataaagacgctggtatgataactttggtagataaaaatgaagaagaataatcttgatcaagtagctgattttctaagattttgtagtttagaacgtggcttaagtaagaatactgttaattcatatcagttagatttaaatcaatttgttgaatatttggataaagagaaaatttctgattggccagaagatccactggttattgattcttacttagctaaacagcgtgatgaaggtaagaaaactagtacaattagtcgtggtattaccacgttaagacgtttttatcgctatttattacggcagcatattttggtggtagatccattaattcaaattgataccccaaagcaagaaaaaagactaccacttgccctttctcaaaaagaagtaagtgaattacttgctcaacctaatcttaatacagcaactggattgcgagatcgtgcaattttggaattgttatatgcaactgggatgcgggttagcgagttaattaacttaaaggaaacagacttacatacagacttaaagataattagagttttaggtaaaggttcgaaagaacggcttgttccagtaactgattttgccttaaattgggttgataagtacttaaaagaagttagagatccagccttactaaaaaaaggagttgcgtgcgactttttatttttgaataatcgagctggccaattaacgagacaggctgtttggcagtcaataaaaaaatatagtaaattagcaagaattgacaaagatattactcctcatactttaagacatacctttgctacccatcttcttgaaaatggggcagatttgagagtggtacaagaaatattaggacacagtgatattagtacaacgcaaatttatactaatttatcacaaaagcatatttttgatgtttatctgaaaacacatcctagagcataattatgttagtaaaatataaaaaagactatgaaaaaattgcaatggggcttttgtcttatttgccagatttaagaaatttaaagaatttacaggaagagatgagcttgtatgatgataactctgatgaattcttcttgtatttatttagggataaagattccgatttaattggaactgttggaattcaattgttagaacattttgttttgattagatatttatcactagcaccaggatttagagatcgtaaatatgaacaagctataatgaacgacttgcatgatgaatttcctaaaaagaaactaacagcacttccaaattatagttacttatttaaggattaacgatgacagaaaatttaaaagttgaattacccaattttgaaggaccattagatttattattacacttaattcgctcacaagaaattgatatttatgatattccaattgcggaaataacaagacaatatcttaattacttagagaaaatgaaagaacttaatttacaactagctggcgaatatttcgttatggcttcaaccttgttgaggatcaagtcacagtacttattacctaaaaatgactttgttgagttagaacaagagcctgaaattgacccaaggcaagagttagttgagcaattggttcaatattcagttttcaaaaaaatatctaagtatttgaagcagcgtaatgacagtgttcctgttactgtatctaaagaaccaagtgctggacaagccaaaactatttcccctttaccattagggcagcttagtgagagtgaattggctaataccttttctttattaatccgtcgatataagctaaggaagcctgagtcagcaacagtaaagattaagtattcttctgtaagtgatatgactaagatgcttgaagaaaagttcttgcaagttgcagagattagctttttctcatgtattcaaaaaatcaaaacattagatgatgttatttcactttttttagctattttagaaatgagcaaaaataaaaaaataagagtaagtcaaggtcgtgaatatggcgatttgacaatagaaagaattgattaataaatggcaactaaactcgctgaattagaaagtttattatatctagctggtgatacaggtgttgaacaatccaatttgtgtcaattattggaagttaaagcacctgctctacgtgaactagcaaaaaaattaactcaaaaattatctgaagataaaaattctggcttgcaaattagcttaattaaagatacttataaaatgactacaagttatgatgttgcagaggttgtcgagaagtattatcaaaaagatctttcaaaaacactaagtcagtcagctttagaaattttagcaattgttgcatatcgtcagccaattaccagaattgagattgatgaaattcgaggagtaaattctgctggtgcaatccagacattgatttggcggggcttagtaaaaataagtggtaaaaaagatgtcccaggtcatcctaacttatatgtaactactgattacttcttacaatattttggttatgaatctttagctgacttgccagtaattgaagattttgaaaatgagagtattgatgaaaagggacaagtcgatctttttaaggcaaaagatagtaataatcctcaaagtttagattaggagaataataatggcagaacgtttgcaaaaattgattgcccaagcaggtatagcttctcgccgaaaggctgaaaagctaattactgagggtcgagttgcagttaatgggaaaattgtaactgagttaggaactaaagttgaatcaagcgctagtattgaagttgatggcttgccaatccaaaaggaaagtaagcatacttatcttttatacaagcctagaggagttatttcttctgttaaagatgacaaaggtagaaaaacagttttagacttttttgaagaaagcccatatcgtttgtatccagttggtagacttgattatgatacatcaggcttacttttgattactaacgatggggaactagctaataagttaatgcacccacgtcatatggtagataaggtgtatgtagctaaaattaaaggctttctgactcctgaagaaatacatagtttaaaacatggtgtcagaattgatggtaaaaagtcagctcctgcaaaggtaaaaatcatcagtactaatcgagagaaaggaacttctattgttcaattaacaattcatgagggccactaccaccaagtaaaaagaatgtttaaggcagttggtcacttagttgataagttatctcgtgaacgttatgcctttctaacattgaaatcacttactgctggtaaatatcgtgaattgacacgcgaagaagttaccaagctaaaaagcatgtagtatactgaagctgaaattaataggaaagcgtcttcaaggcagggtgaaagtcccgaccggctgtttgagtcagcaacccacttatgtggctgaaccttaaggtaccgatagtatagtctagatggaagaagacaggctgataaagaaaaatcataatactttctcaaaggtctgcctcttggagcgcagaccttttttgaggaaagattatgtcagaatcaagatcaagtttagctaaaacattggcagcagtgatgattggggtaattgcttttgtagtaatgaagttcgaattcccaattatccctctttttccatttttaaagatggatttttcagatgttattatcttaattggtagttttttgtttggaccagtttcaggtattggcatggcctttattaagtgctttttgagtttagctttatcaggtttcaatattttatctttggttggacaattagctgcttttatagcaagtgtttgctacattgtacctttgtatatgattagcaagaaaaatgaaaacaagtttgtaatgcaagtagctgcatgcagttggtacaatttgtttaacagttgcaatgagcttagcaaatatttggcttttgatgccgatgtatgcaaagtttgctaactttaatttcccagcaacctatatcctttatggtgttgttccatttaatgttgcaaaaggtataattaatgggattttagcaattttggtaattaagtttgtcattccacaattagaaaactttgcgtcaaagagattttagtttaattaatttgaatgagccctaagaagggcttttttctttgttccaaattatgctaaaataacaatgattatgttgggagagtgtttaacgtgaataacaattcatcaaataacggcccttacaaacattttaagcggcctgaacaaggacgagttcaacagacaaaacctaataaggcgcatcattttattaaatgggtgattgggttagtaattgttgtattggttgctgtaccggtttacttaatggttaatcataaatcatcaagttcgcaagtcgttacaccggctaaagttaaaacttctgctttaagttctactagttctaaaagtaaaaagattaagatggtaaagcaatcatctaagtcaagttcaagttctagtgcaagttcagttgaaagtaaagcatcatcaagttcgcaagttgctgctacaagttcggttgctagttcatcaagttcagaagtgcgcacatacgtaattcaagaaggcgatagtttgtcttctattgcagctgctcatggtatgagcgttgatacgttagctagtttaaataacataactgatgcaacaagcattagagctggtgaaacactcagacttaactaaaaataagagaaagggtaagagacctcggtctcttttttattggaatgcaagtagctattgatggtccagcatctgctggaaaaagtacagttgccaagattattgctaagaaactaggctttatttatattgatactggtgcaatgtatcgagcatgtactcttattgcaaaaaaagaacatattgattatggtgatgaagctcggattttagaggcaattaaccaaaataaaattgagtttaaatcagaaactggtgaacaaaaagtttatgtagctggagaagatgtttctctagctatcagaacgcctgaaattactgaaaatgtatcgcaagttagtgctttaaagggcgttcgtgaaaagatggtagaattgcagcgcgaaatggcaggctctaccaatgtgattatggatggtcgtgatattggtacgactgttttgccagatgctgaattaaagatctttttagtagcaagtgttcattcacgtgctaagagaagattgcttgattatgctgaaaaaggaattcatgaagatttggctaaaatcgaacatgatattgctgagcgtgattataaagattcacatcgtgcaatttcaccgttaaaaaaggcagatgatgcggttgaagttgatacaacaaatatgtcaattgatgaagtagtggatgatattttggccaaaattaatgctaaaatggcaaaataataaaaaataaagagaaattttgaaaaaaaagctcgaaaaggtggaaaaatatcatgctttcatttaaaattaaacatgatattgggaggtatttatgtcagataacagtaatcaatttttagatgctttaaaagaaatgcaaggtgttgaagttggcaacattgtagacgttgaagttttaagtgttgaagacggacaaattgcagttggtgttcaaaatgcaggtgttgaaggtgtcatcactcgtcgtgaattcacacaagatcgcaatgcagatcttcacgacttagttaagcctggtgatactttcaaggctttggtattgagaagagcaggtggcgataaagaaaacggcgaattcttcttctcagtaactcgtttgaaggaaagagaagcattcgacaagcttgaaaaggactacgaagcaggtaacgcaatcgagggtactgtaactagttcagtacgtggtggtttgattgttaacgttggtactagaggtttcttaccagcatcattaatttctaaccactttgtttcagaccttaagccatacattggtaagactattaaggttaagattaccgaaatcgatcctaacaagaatcgtttaatcctttcacacaaggaattaatcgaagaagaacgtgaagaagcatttgaaactgttgcttcacaacttgttgcaggtgatatcgtagaaggtaaggtttcacgtttaactaactttggtgcctttgtagatgttggtggtgttgacggtttagttcacatctctgaaatctcatacaagcatattgacaagcctagtgatgttttgaagactggtcaagatgttaaggttaaagttatcggtatcgatgacgacagacaccgcatctccctttcaattaagcaaactgaaccatcaccatttgaacaagcaacttcagaattaagtgaaggcgaagtagttgaaggtgaagttaagtcattgacttcatttggtgcctttgttgaagtagcagatggtatccaaggtttagtacacgtttctgaaatttcaaacaagcgtgttgaaaagcctagcgatgttttgaaggttggcgaaactgttaaggttaaagttttgaacattaacccagatgaaaagagaatttctctttcaattaaacaagctcaaccagcagctgaaggcgaaggaaacaacgctcgtcgtagcgcatcacgtaacgattctgtagctaagaagtacatgagcgacaacaacgacaacggctttgcacttggcgacatcattggtgaccaattgaaagaccgtcaataatgatgactaaaaagccgacgatagtcggctttttttgttggattttaaattaagaaaatatagaagggatgataataatggctctaccaactgtcgcaattgttggtcaacctaatgttggaaaatcaactttatttaatcgaattattaatgaacgtttagctattgttgaagaccgaccaggagtaactcgtgaccgtaattatgccaaagcctcttggctaggccatgaatttaatatcattgatactggtggtatcacttgggaaggtggacgaattgaagatgaaattcgggcccaagcagatattgcgatggaagaagcagatgtaattgtaatgattactagcgttgctttgcatttgactgatttagatgagagaattgcacgaattctttatcgctcaagcaagccagttttattggctgtaaataaggctgataacccagaacaacgggcagatatttatgatttttatagtttgggtttaggagatccgattcctatttcatcaacgcatggtactggaattggtgacttacttgatgcaattgttgaaaactttccgcctgaagctgatacaaaagatgaagacgaaattgcttttagtgttattggtcgcccaaacgtgggtaaatcatctattattaatgctatgcttggtcaaaagcgggttattgttgctaatgaagaaggcacaacaagagatgctgttgatacgccttttgtagctgaagatggtactaagtttagaatgattgataccgctggtattagaagacgaggaaaagtttacgaaaagacagaaaaatattctgttttacgtgcgcaagctgcaattcaacgttcagatgtggtgtgtcttgttttagatgcaagtactggcattcgtgaacaagataaacacgttgctggatttgctcatgatgctggccgtgggatgcttattgttgtcaataagtgggatttacctaaaaaagattctaactccgctaaggactttacaagagttattcgtgaagaattccaatatctggactatgctccaattgtttttgtatcagcaaaaacaggaaagaatttagagcaacttcctgatttaattaaagaagttgctgaaaatcaaagtcaaagaattcaatctagtgtcttaaatgatatgttgattgaggcatctaaacttgttccctctcctttaattaagggcaaacggttaagagtttactatatgacccaagtagccgttcagccaccaacttttgtggtctttgtaaacgatcctgaattgatgcacttttcatataagcgctttttgattaatcaacttcgggataatttcgactttactggtactccgataaaaatcttgccacgtaagcgaaaataaggggatttaaagcgcctttttaataataaactaagaaaatttaatatttgtatctagcaaagaaggatttatcatttatttttcgaaaaaaccttgttatgacgggcttaatgtgctatttttaaaagcaggaaacaatgattggtcatgatcattcttccttattctttttaaagaataagtctgaactcgtaggttcaaactcaggaggtgaatacaatggcaaacaaagcagaattagtagcagaagtagcagctaagactaagcttactaagaaggatgttgctgcagcagttgacgcaatttttgcatcaattcaagaagatcttgctaagggcgaaaaggttcaattaatcggctttggtactttcgaagtacgtaaccgtgcagctcgtaagggtcgtaacccacaaactggtgttgaaatcgaaatccctgcaagcaaggttcctgcattcaagcctggtaaggctcttaaggatgctgttaagtaatttttacttaacttttaaaaggtctaggttttcctaggcttttttaatttcttaaattacttgaagctgttaagatagaaagagcgaatttacttagaaagaaggatcaattgatgtcatattctgagcaactgcttgatgcaattgaaaaacatgatttttctcaaaataatatccttttaaaaaaggcacttgattctgacagtagtgagcttctcgcagctttggctgagaacttaacagatatgggttttagtgatatggcaaaagatgtttaccgtgcattgattgctaagaatcctgaagaggacttgtttaaagtttatctagccgagatcttattgaatgatggtcaagatgatgatgctttaagcttactttatagtattgatgaaaatagtgatagctatttggaaagtttattagtacaagcggattattatcaatcacttggtttgcttgaaactgctcaagctaaattacaagaagcacatgaattagctcctaaagaagatgcaattatttttggactagccgaattagcttattcaactggtaaaaatgaattggcattgcactactatcaagatttagctactagacagaagcactttggagaaattaatttacgcgagaggatttttgctagtttagctaaattaggtcgctatgaagaagccagtgaaataatcaaacaatatggacaggactttattgatattgatacgcgatatgaagctggcttagttctgttaagtacaaaagattataaaaaggcgattgaatacttgacgggtgtattagagcaggcaaatgattatgtaaatgcctatccattacttgcacaagcttatgaagcaaatggtgataatgaaaaggctctagaaacggctcaaacaggtttaacctataatgaatacgatgagactctctacgccttaatcgggcgcgtagcggctaatagtactaaatatgaacttgcagttgatatgctcaaaaaaggtttgacctttgcccctgaaaatatggatttacgagttcaattatcaaacctatatctttatttgaaaaaagacgaagaaaacttgcacttgttccaagagattgatgatgaaaatcttgagccacaagctaggtggaatattgcagtttcactctatcatttggaaaaatatcaagagtcacgcaaagaattcttgcttgcttatccaaacttgcaaaataacgctgaatttttgaaagatatgattcgactatttaatattgatggagaacgaggggtattgaaagacttacttcaaaagtatttgaagttaattccagatgatgaggaaatgctagacttatatgatgaactagtataaccaataaaaagaaccatatagaaatatatggttctttttatgtagcttttcaaagtgaaaatattattattttttatgtataaatgagatatacatacctctaaagtggagaccgtaaaatagtttgtgtaaggatgaattattccttaatttaatttcctaaaacattagaaaaaggagttcctttctcgtatgattggtttgaacaaaaaaaacatacagaaagaagaactccttcatgaatgattttaccaaaaatataactcaagctctattcaatcaagataaaattaatgatttgcttcgtcatgaaatccaacaagctgttaatgacatgttagaatctgaactgactgcctttttaggatatgatccctatgctagaaatggctggaatactggtaattctagaaatggtgcgtatttccgtaaaattgatacccagtttggatcaattgaggtacaagtgccacgagatcgcaatggtatgtttcatcaacacactctgccagactataaacaacatactgatctcttagaagatatggttataaagctttattctaaaggtgtaaccactagagaaatagctaatttgatcgaaaaaatgtatggcagtcattatagtccagctcaagtgtctaatatctctaagcaaatgattcctaaagttgaggcttatcacaagcgtaagctgagcgataagttcttttgtgtttatcttgatacaacgtatataccgttgcgtcgagaaacttttgaacgagaagcagtatatattgccattggcatcaagcctaatggtcacaaggaagttatcgactactgcattgcgcctagtgagaatattgaagtctggacggcgttgctccagaacatgaaatctcgtggtttaaagcaagtagagcttttcctttcagatggcgttgtcggcatgaaagcagcactggcaaagacctatcctcaagctcatttccaacgctgcttggtccatgttatgcgcaacatctgcgctaaagtacgcgtggacgatcgcgaggcaatcatgaacgaattcaagcagattcaccagcaagccaataaagcggctgctgttgatgtattgcatgctttttatgccaaatggaacaagagctacaatcgtgtcattagaaacctgaaagacatcgagccagacctgcttgttttttataattatcctaagcagatcagggcttcaatttactctaccaacatgatcgaatcctttaataacgtcattaagcgcaaggctaagcctaaagcggagttcccgactgaacagtcgcttgatacttttattggcatccaagcaatgagctacaatgaccgctacttcaaccgaattcacaaaggctttggtcaagtccaggataccttagaatcctattttgaataaataaaacgttaaaaaaacaatttacgagaaagatctatttacacaaaaaatttgacagtttcatagcttcttttattcttttaaatgccaatacggtatatatacattctaatcccaaagtttatcaaatttgtcaaatgatttttcccattatttgtttattttttatttttatttctttttgtttcaatgatttcaaaattgattacatgtttttctttggcattggagtttcattgtacatattaatgtgggttttatatcaaatagcttttttgggtggtaataggacttcactattaattccaataaatttttgtttgatatttttgttaatatggacccaaattaagaaaaacaatctaattcaattaactaatgcatatgttaatcttgttgtaattgtagctgctatttcaattgttttttggcttttaacgaatatattccataaattaataccaagcaattatgttttattgtattggggatatgaaagattcatacctaattatcataatttatactttgaaactcagcaatggggagacatttttagaaatacagcaatttttactgaagcgccgatggctgctttaaattttcttgttgcattagcctttaacatgatttttctgaataaaacaaaactggctaaatttaagagtttcattttaatcattgcaggactcatgacaatttcaacaactatgtatattggaattttagcccttcttatttatagattttttgaaaaaacagcaagagctaataagtatatttctcttattaaatttatttttataataattttgtttgttatatcagcagttattgtgaacagcctcataaatagcaaattgcaaactggctctggaattgatagatcttcagattatattaacggaattaatgcatggattaaccatccaataatggggaatggattaaatgcagaaatcaacgaaggaacaactataattaatggtgaagtgattgggcattacggatttagtagttcattttcacaacttttaggtgacagtggattgtttttggtagttccaatttttttatcaatattagaaacaattagaaaatctatttttataaaagaatggaaaattttgatattatcaatacttttcatgtatttagtttttgtatcaatttttacaactacatatttatttatgtatttattaatttttatagttatgtggaacttttcagatatctctgaattaaatagaaaggcacatttagaatgaattatcttattgtaggcgcaggcctttttggcacagtatttgctcgcgaagctgctaatcgtggaaataaagttacaattattgaaagacgtaatcatattgctggtaatatctacactaaagaagtagatggaattcaagttcatcaatatggtgctcatattttccatacttcaaataaggaagtttggaattatgttcaccaattcgctgaatttaatcgttatactaactgccctgtagccaactacaagggacacatgtataacttaccattcaatatgaatactttcagtgaaatgtggggagtgaagactccacaagaagctatggacaagattaacgaacaacgtcaagaaatggctggtaaagcacctcaaaaccttgaagaacaagctatttcattaattggacgtgatatctatgaaaagttaatcaaaggctatactgaaaagcaatgggggagaaaagcaactgaacttccagcattcatcattaagcgtcttccagttcgtttaacttatgataacaactacttcaatgatgattatcaaggtattccaattggtggatatactaagatggtagaaaagatgcttgatcatccgaacattactattgaactaaatactgatttcttcgataagaaggatgaatacttaaataactttgataaagttgtttacactggaatgattgataagttctttgattataagttaggcgaactcgaatatcgttcacttcactttgaaactgaagaaaagaatgttggcaactaccaaggtaatgctgtaattaactatactgaagctgaaattccttataccagaattattgaacacaaacactttgaattcggtaaaggtgataaggataagaccattattactcgtgaatatcctgctgattggaagcgtggggatgaaccttattatccagtaaacaataatcgtaataatgacttgtacaagaagtatgctgaacttgctggtaagcaagataaagttgtttttggtgggcgtttaggtcaatacaagtactacaatatggatcaagtaattgcggcagcacttgaagcagttaatagcgaatttggtgagtagagtaaatgaaaaagataaaaattggctatgtttcgccggtaaatcctgaagaagatagaatggcttggtcaggaacttactacaatacttttcatgcaattagagatgcgggaatagatgtgaaatggatttcctacggtacaaatacctttttatttaagtttgtaacttttatcactaaatgtgcatatcgtttaatttatggaaaaggttcatctgaacatagtagaataatggcaaaagtccatggactatttattaaacgaagtcaactagaagactgtgatgtagtatttatcccagctcaaatagatatggtagtaggtattagaacaaatttacccattatttattatgcagatgggacttttaagaaaatgataaattatcagtggtttggctatacccaaagtgcaattcgggaaggcgaaaaaactgaattattagggattgctaaagctaagtataattttagatcttcacaatgggcagccgattccactatcaaagattatggtgcaccagaagaaaatacgtatatttttcctttcggtgcagatgtacctcaagaaagaaaattttcatcagaaccgatttataaaaataaaagtttgaagttattattttctggaaaagagtgggaacgtaaaggtggcaatattgctgtggatgccgcaagatatttaaatgggataggaataaagaccactatttttatagttggtgtaaaagagctacctaagcaatattctggagataaatttattggatatttagataaaaacaacggaaaagagttaaagaagtacctaaaactatattctgaatgtaatgcttttattctcccgactagagcagaatgtgcaggaatagtatttgctgaagctaattcgtatggaatgcctatttttgctacagatactggtggaattggaaattatgtaattaacggtgttaatggatatagattaccattatcagctacgggaaaagattttggaaaattaattgagaaagtttataagaatagggaatttagtcaactttcaaaaggggctttaaaaacttattctgaaaaaacaaactggaagagttggtcagataatttccggaattttattatcaaaaatttttagatattctttaataagtaattatcttttaaactaggagtaaaaatgaaaaatgaaattttaatttcaataataattcccgtatataatgtagaaagatacttacattcatgtcttaatagtttaatttctaaaaatatgaaatctgtagaaattattttagtggatgatggatcttcagatagttctggtgatatttgtgataaatatgataataagtatgattttgttcgagttaagcatatttcaaatcaaggagtttcctatgcaagaaatctaggattgaaaatggcaaggggaaagtggattagttgggttgatagtgatgatactgtttgtcctggttttattgatattataaaaaaacttgtgcaaatagaaaaaatagacgtgtttaaatttggttatcaagttttagatttaaatactaattttaaaatgtcccaaaaatcttttaatccaaaatcactcatttctgaaacaaaagaaatggcaatgtatgatttagcttctgtcaaatacggaaattatttatggtgtagactttttaaaaagaagctttttaataatttagaatttccagttgggaataattgtgaagatgcatttttgatgattgaaattttaaataatgcccaaaattttgcattgtatgacgaattattatattatcacttttcaagacctaatagtgtaacacataacagtgataaaactaaattaatgttacagtcaaaagattggtttgaaagtaatattagacttactaataagctaaaagagtatggctttcaaaaagcatatgaaaaatcagaaagtagtattttagatattgcatattttcttgcaagggacattgattttagaggatatccagatgttggaatttatgctaaggcagatgaaatactgaataattataaaaaatatataaatccgactacttcaaaaaagagaatcatacaatttttcttaagatctaagtgtagatttttttatgattacatttacaggcttagtggtaaagtttaattgtaattaaagtaaaggtgtttttagtagtgaaaagaaaaaagtcattaggatttaatggacttttgaatggtgtacgtagtgcattaaatttagtttttccattaattacttttccctatataactagggtgctttcagtaggttcagtaggtgcatataatttttctaatacttatgttggatattttattttgcttgctggattgggtatatcaacctatgcagttcgtgaaggtgcaaaatatcgtgataatcgggaaaagttaagtaagtttgctagtgaaatatttgctattaatctttggtctacagtagtatcttatgttttattgtttatgagtctgttaatttttagaaatttacaaacttatttattatttattttgattttcagtgttcaaatttttttcactacagttggtatagagtggatttatattataaatgaagattatagctatataacagcaagaagtattatttttaaaattatttcaattgtgatgctattcttacttgtcaaaagtagaaatgattatctatggtatgccggaattacagtgttttcaagtgtgggttccaatgtactcaactatataaatgcgaataagatatgtgatattcgacttactactaatataaattggaaaaaacatcttaaaccaatttttataatatttgcatcaacacttgccgtgaatatttacttatcatctgatacaacaattttgggaattatgaaatcagattatgatgtaggcatttatagtattacagtgaaaatttataacattgttgcgactttattaggatcagtaatgactgttacggttccacgattatctatgctcatgggtcagggaaagatgaaagaatataaagaaacatttataagagttataaatgttttagccttattagttattcctggaacaattggtctaatgatgctgagccaagaaattgtattactgattgcaggaccaaagtatttagaatcaaccaatgcattgagaattataggactagccgttattttttctaattttagttttgttttctataattgtgtgcttattcctgcaaaaagagaaaaacagggcttatttaatacaattgctgctgcaattgtaaatgttctattaaatatttgtcttatcccaatgttcgcatatgatgggacctcatttagtacggtagttgctgaaataatgactacagttatgaatttctgggcaggaaaagacataattaaaagtactgtattttctaaaagagtaattcataatctttttacagtgctgattgctagtatatttgtagcaatatcctgctggatttgtaaacttattttcgcatcacttctgcttcgaattggggcttctgtaattagttcaggtatagtttattttgtagcacttgtactcttgaaaaatgaattggtagtaagtaaattaaaaagatagacgatttcacttaaacctaatgtacaaagattttaagtatcaattatttacgtgtaaaatttaggagaaatactatgaagttcaaaagaattgaatggattgattttgggagaggttttacgatttttctggtcgtagttggccatgtgctatctggtatttatactaaccatatttatcctaatagtgatggcctattaatgttttttggtgaattcatctttttatttatcatgccggtatttttctcactctctggttatttctttaaagcaccagaaaatatggtagattatattgttatgattaaaaagaaggcatggaacattttagttccatacattgttttttcatttgtatatgtattactgaaccaattgggggggaagtctaaggagtatagctggggcgatttgctgaaaatttggtatcaccctatatcatatctttggtttttgtatattttattctttatttttatacttgtaggtgcatttagtcttttaaaggtaagtcttcgacttcaattacttatatactttataggttttattttagttcaagtcttaaagataaatttttacatctttaacgtctttggttgggtagtatttttctgtctgggtttactttttaaaaaggatttgaattgtatcaagagtaaaggaattttatcagcatcacttgttttaagtattcttggctacttgctaatgattaagtttgttggattgagtcatgcatattacaatgatgtatctttagttaatttcatacctaaagtaatttttgacattcttttgtttagctttttccttaacattgatgaagaaagcaagctctttaaatactttaaacagtatgggaaatattctttgataatttatatggttcatgctcctgtattatcagcaataagagcaataatattgaaatttactatgcccaatgtttttgtgttgatggttgttttattaatcataggttgggtaagttgtttagttgttatttggatgaataacagatttagacttatcaattttatctttaatgcatacgctaatgttaagaagataaaaaataaaaggtaagttatcgattagataaaattcttaaagcaaaaaacaagctatgaaattagcttgtttttttaacggttcttttcaaatccaattaatggaaagtgattttaagaaaccaggcaagatgtaaatttaattagcttggttctttttaacggatactaacaggtttatgggcagcaaaagtaagaaattcaatgttagttaggaaataatcatattgtaaaaatgcaaaaatggcaagatggttgaaaagataaaaagtatttaatatagtctttgtacgataacataaaaaaatttgatatccttatcgcaattagaggaaccatacctcctttttttacaaaccagttttctaattagaagcataaatccatgaataataattgatagaatgctgaataagaacaggttttgacaaaaaggattgtccataccaataaatttaaacagtttgtcaaaaagatttgattcttgtaaattaaaataattccaaatataagataataaactcaattcaaatatcaaaaatgatatagtatctttcactttggcgtagataacttttatcttttgtttaggttcccatgtttcattgttgaagaagctttgacaatttttttgaaaagaaaagactgttataagaagagaaaaaattattgaaaaattattgaatttagttgctgttccaagtagtagcaaccaaagagttagtctaacgacagtctgaataccaataagtgaaattattaataaataaccaaaaataataaaaggtattaaattattccagttgattgtatggtgtgtatattgatacatcatttttaatgagtatacatattgaatagcgtatacatattgaatagcgtatacaaaatataccgttaaagattttatacatttaacaattgacttggataaatcctgttccttttgtataggataatcaacaacttgtgataaagtgacaataataaaaatcaaggtatatattgctatgattacatcattttcgctatttctcggatgaatcatacaaagaattaataagaaaaaatactcataaccgtttagatttaaaagaaataaagctagaagagctacatagaataaaatgctataaatagggaattttaagaagtatagtattgtcattaatagaatcttatttatcaataagtgattagaatataattgaaataattgattgataaacttaagttttggaacttttttgaaagtagaatcaaacttatcaatgtatataatataagttgtaagataaaataatgaaataattgataaaaataacgtaatcatctttttccctctttataaaaaacaaatttatataattatactctatataaaataccttattctaaaaaatctaacaacttagtagtgttaataatatatattgtattatagtgttatcccctaaactataatattaatatacttataatatattaaatagtattaattaaaaagcactattataatttttcggcttttatatattattaatatatgctttttattaaacgttcaaaaaaatagactttatttacactatattgaataatgaggttagataaataatataaaaaagcataatgatttgtgactgttttcacaagtaatagaaaggtactcatatggtagaaaaaagccaatacttcaagaatcttattaaagttgtagttgataattctgaatcaaaagattggaaatcggctgtggacgaatggaaaatcattgatgtagtggaagatgaaaaacttgaggaatcatgtatatgtggtaaagaacatcttagatatctttttacaattaagaatgaagagaatggtagaaagctttatcccataggaagattatgtattaaaaaatttgaacgtaaagaattaaaagatgaagtgaacattaaggaacaattgttcaaattgttacacgcagtggaagataacgaatttcttcaattgagctctgaatattttagtcgcaagctattacactatttatatgaagctggtgcatttaaagccacacaatggaatgataatgatccaaaaaagactatcaatttttacgtgatatgtttaacaaaaagaagagaactgaaaaacaggataagaaagcagttgctattattcttagttcaataaaaccatttcttcaggataaattatctgaaaaagtaaaaaaataaaaaattagttttaattttattatatatttcgaaatgtagttattgtataatactcttattaagataggaataattgttataaccacgctgtatcatttacagaaatttttgaaaatagtagtattgatgattaaaaaaattactaggggtataaaatatgtgttctaatcaagaagataaaaaaattttaaaatcagaattacaattgccggatattcaaaaacgtttggtaacactaaatcaagatttgactaatacggattttgacagtgtaaattctgaatttattggcttaattattaaaaatatacaagttcaaaaaggaattttcatatcattagctttcccgaaattttgcccatataatcacaaaaaaattttagaaccaatacttttatattatattcgctatagaactaaagaacattttgaaaccaaatttaccaactttattttcaaggtgatagctgaagcctgtttacgttatttcagcttaaaagatgtaagtagcttcttagataaagttacaaaagaggtaattgaatcagattatcccgattttaagtttaaagaaagctatcaggcaaatgatgactggaaggaaaatctaagacgaccggtaaagacgccccgaaattatcgtaaaaagcaaagactagttttagtattactagcagctgaaatgcagttagattacgtggacttgttaaaaaaagatatagaagttgaacatatttatcctcaagctggtgaaaatgatgatgatagaatttatactattggtaatttaacgctacttgaaaaaaagttgaatggtaaggcaagtaatcatgacttttgtgacaaaaaaaataattatcaaaaatcaaagattactataactcaggagttgtatgaaatggacagttgggattttgacgaaatagattctagaacggaagatttgatttcagatttggaaggcattttcggtcaatggcaagatgattatagggagctgcttaatacgaattaattgttgataaggattggattatagaatcaagcaatgataaaattgcttgattcttttttagtctaaaactgagatttataggcactaaaagaacgcttgttcagagtcgaaaaatcatgtaaaataaatatttaagtagtgggtatcttgtatgaatagttgtcataacattgacgaaaaatatggagtaatagtagcttctagaatgaaaaagcgtaaattacttttaatcactttaatttgaaattctagtctgttatgctctttttggaaaacaagaatatagacatacagctgaacttttataattgttaagctatctaataattaatataaaagtggggatttatttgaaaaatagcaatcattttgatcaattatctattgaggaaattaatgaacttattaaagcagaaaaaaatccagaaaataagcttgattttaatgatatataatcaagtaatagggacactaaatttggaagctaatcaagttaaatgtaaggttaatgataaaaaagaaagatagaatataattttatttgtaacattacacctatagaaactaaatttagtattatgcttgttttcagaaaaataaataggacattgataagattcgattttggtgaaaagttaagacataaaaataatatgggaaccaaccatgaaaaagtaataactggatcgtatgttcacatttattctccaaatggaaagtatgataagaaaaatgttattccgatttctaaattttctgaatttgtaaatattaaatcaattaaagagtgtttagatccatttataaaatatactaatattaaatggtaaggaggtgcttttttgatgaataaggcagaactattgaaaaatagctattataattggctgaacgaagaattaacatttactgaacaagataattatgtggaaattactactccttttcttgatagtgtgtttgataatatttgtatttatgcaaaatttgctaaagagaatagcgttgaattatcagattttggacaaactttatttaatttagagggtcaaggcatttctattcaagaaaaaaataaaaaaatatggaatagtttcaaaactatacttgatgattttggaatatctattgaaggacgttctttagtaataattacaccacttgataaatttccaacagctaaaaacagaatattgcaagcaattatgaaagtgaatgatttggtttttatgtataccaataaatcacagagttcatttgatgagatagtatcagattatttatcagataataaaatcctttttactaagaatatccaaattgtcaatacttctgtagcagcttcaatctttgatttttccattccatttgaaaatggaagaagtaagttgattaaaacagttgctagacctaatgattataattctgcaaagatatttaattatgatgtaaaagcttgcttgccgattagaagttcagatcaatttgtttgtttatttaatgatcaaaagggaaaacaagtggatccaagtacaattaatactgctcttgagggtgtgaacacttctgttgctagagcattttcattttctgaagcacaagaaaataatgtgcttgataataaagagctataaatttagtaattaaatttagaatttataagggagaatttacatgctcataaaagatagcttatgggagaaagtactagattcatggagaaatggatataaattaccaactaagttttatttttatatggcttttttggaaatagttggttcattattattgctatgttctgctaaatctggccagactagtcagagccttttatcaaaattttataattatatttattcggatgtaggcctcaatattgtattagtaattgctcttatttttgcttttctattgtttattttacctaattctgaaaacgtttcttcaagtataaaagaaagactcaagaagacaaaggttcaaaagattattggatggattagaaaaaataagtgttttcaagcaattattcgatggattagaagaaagaagtttactcaggcatttattcaaataatcagaaaaattataaatttctttaaaacgagagttcaaaaaatcagaaagaataaacactttcaagcgattattcaggttctatataaaagcacctattatttggcttttgtaatagtattttactttacaatactatttactttgccgggctacttaaatttaattagtagtatgactaatacagcacctttatttattatgataggatataactataatatgctgtgctatataaatctctcttttgggggagttgcattaataatgagctgtattcaatttagaaatccgagtattgacaagaatatagaattagataaaaatgcattaaatagtggctgtctaaagaaagtatctgatattgattattattttgacagtaagtatgtcggtaatacaacattttacaagcttaggtgggtaggtaatattaatagaaaaaaggtagactgtttagattttattatcaaaaatcctattttgatattttactatatttgtatgtgcatcacatatgtaataatactaggtctttgctatttaaatttcccaatattgcaaattattttattttggaaatttttaatttccgtatttcttgttttaattatatttacaatagtaaagaatttaaagaattcagttatacttgttaaaaaatataaatttaaaataattatttctgcaccatcatatgaggaattgctgagacgtgagaaatttataaaatcttttgataaaaatgttttgccttaattttttaatatatggctctaaagtaagaaaagacatcagtgcgtgataatattatcgatttttcaaagattccccctatttaatctaaaatatgatatattaatagaaatcaagttctccacatttatttaagcattttgcttaaataagaagcgcattagtacaagcgtgagcgtggggtttttctttgcccaattttttaagattatcacagagaaattagaatttttgctgtatttatctttagaagcaattaatttctctggaggtaattatgtcatataatgatggcaagttttatggattcacaaacgatgagatttttggtagtattatgcaaaataagcgcttttgcaaggcgattattaaagcagtactacctgatgtgaatgtagtttcggtagaaagtattgatacccagaaagaattgggtaccaagagtgacaagcgaagtaagtcggtgaggcttgatattgcggtcaaggatcaagcgggtaacttatatgatcttgaaatgcaggttaataacaatcatgacattgggccacgcatgcggtattatcaatcctcgatggatcgggatactttagatcgcggagagccgtacacatcattggcacgaacatatttgatattcctttgtgcttttgatccatttggtaagggaaagctgcggtatagttttcacttgtacgatgatgaagacaaggatattcagctggagaacaatgccgaaaatataattataaattccaaaggtactggtagtgatgatgtcgatttgttaaatctccaaaagttgatgaacgatgataaaatagaagtagcaggagttttcaaagaaattcagactaagattaaagagtataatgatgatccgaaaaggagaaaccttatgagaacagcagaactacgtatgaaggaagaaactgcagtagcagaaagacgagggcgagaagaagggcgtgaagaagagcaaaagaacacggtgaaagtcttcaaaatattgaagccagaagcaacagtggctgaaggcttagcttggataagaaagaatacaaatgtgtccctttcagatgaggaaatcaaagctattttgagcagaagcaactagtttcgcttaaaaaggagaaaccttatgagaacagcagaattacgcatgaaagaagaaaccgcagtagcggaaagacgagggcgagaagaaggcgacaagaatacggtaaaagtcttaacagcaacaatcaaagaaatgcgaccacatatcaatgaatctacattgtttaagcaaataaagaaatctgttcgcccaaattttagcctaagcgatacagaaatcatggatataattcgtcaaaatttgaaatagattaaagtaagctagttgattatttgaataaataattgtatattgttgcgtgaggaaataacggtttgaccgttagctgaactagggttatattcagaactgaaggcggctagataaataaaagaaaagcagctcctatattgagctgctttttttctatttaatgacttaactcataagcttttttaactgaggttggcatctttctttgatcaatctttctttgcaagtcaacttcgtctttgacattttggttaagaagttgctcgtaataccagcatttgaaatctagcatagctttagttgcttgaagctgtttaatttcatattcaatttcttggcgttgcttattgaacatttcttgtcggaatttataagttgcttgtccttcacgacaccaaacgaagtattgcttaatatctttgatttcaaggcctgatttttttaaacaggcaattacccgtaaacattcaagttcgcgctcagtaaaaatacgttgattgccttttctttgcatatcagggaagaggccttctttatcatagtagcgtaaagtagagattggtaaatcaaatattttagcaacttgtccaattgaatacattaaaaaacctccaaaaataatttctcgcttgccctaaagttaggtttaggtattaaaatagtaataacgaatcagaaaaatagcaaataggaggttttataatgaaagcagcaatttttaaagaaaaaggccaaatggaagttgtcgaaaagccggtgcctgaattaaattttgagaatagcgcaattattagaacagttagagcaagtgtttgcggaagtgacttgtggttttttagaggaattgatcaagaagagtcgggtaaagttactggccatgaagcaattggaattgtggagaaagtgggtccagcagtaaaagatgttaagcctggagattttgtaattgcaccatttgttcatggctgtggtcattgcccggcttgccttgcaggttttgaaggtgaatgccaaaataacccggctccatttaataatcattttcaagctgaatattttgaatataataatgctaattggggactagtgaagattccaggtaagccagaagattatactgatgaagagcttgctagttttcaaactttagctgatgtaatgccaactggctttcatgcagctaagatggccagagttaaaaagggtgatacagttgtagttttaggtgatggagctgtcggcttatgtgccatattaagtgcgaagtttttaggagctaagaagattattgcaacaagtcgccacgcagacagagaagctttagctcgtgaatttggagcaactgataatgttgccgttcgaggcgatgaaggcgttaagcaaatccgcgctttaacaaatggagcaggtgctgacgcagttttagaatgtgttggtagtgaattgtctatggatactgctgttaaggttgctcgcgccggcgcaatgattggccgcgttggtgtaccacatgatgaaaaattgaattccaatcagttattctttggtaacttgggagtccaaggtggacccgcatcagtgactacttgggatagaaagtatttacttgatgcagtattgaaacacgaaattaatccaggtcgtgtctttacagcccaatttaaacttgataatattcaaaaagcttatgaagttatggatcaaagaaaggcgattaaatcactgttagttttttaaaagataactaaacgacacttggcatatttgctaagtgtcgtttttattaaaaaacgcttgttcgggaaagccatatcctgtaaaatcatgtaatggagcttagttaaggcgtctccttctggctgctttatttggacaggtagtagaaagtagatgatgtagatgattcaagcaattgttgcattaacgaaatctattgaaaggagaaaatgctgttttgttagaatggctaacgctgctaattgcagcgtgtcagtttgccttgaattggtacatttattatgaccaaaagaaggcagaaaaaaacaaccgtcttagctctggcaagctgatggttgttttggttataattaaaaaataaaacagccggaagtgacgcttaagctccagaggcatcatggcatgtgattttttcactttcgataattcaattgtaaggtgtagaaaattataagtcaataatttttatctaaaacgcttgttcgggaaagccatatcctgtaaaatcatgtaatggagcttagttaaggcgactccttctggctgctttatttggacaggtagtagaaagtaggtgatgtagatgattcagacaatcgctgcattaacgaaatctattgaaaggagaaaatgtttttttgttagaatggctaacgttgctggttgcagcatgccagtttgccttgaattggtacatttattatgaccaaaagaaggtagaaaaaaacaaccgtcttagctctgcaaagctgatggttgtttttatcacaataaaaaataaataaaacagccggaagtgacgcttaagctccagaggcatcatgacatgtgatgcctcttttttcactttcgataattcaattgtaaagtgtagaaaattataagtcaataattttactttctaaaataaagctatgatataatcttaaaaataaattcaattaaattagaggtgggaaaatgagattatcaaaacgaattcaagcagtaactccttcagcaactatggctttgtcaagtcgtgctaaggaactagcaatgcaaggcagagacgttatcaatctttcaattggagaacctgacttcaatactccagattttattggtcaagctgccgttgatgcaattaagaaaagcaaaactgattcatacacgccagctggaggcttattagaacttaaagaaaaaattgtcgataaaatcaattcagaacataaaacacatttttctaatcaaaatattgcagttactactggtgctaagtatgccttatatgttttagcgcaagttttacttaatccagaagatgaagtcttgattcctttaccttactgggtttcatatggtgagcaagttaagcttgcagaggctaagccgatttttgtaaaaccaaaaaaagggttaaaagttacaccagctgatttacaaaaatatactcatcacaaaactaagatgttaattattaattcacctaataatccttctggacaggtttattcgcgttcagaacttgaagcaattggaaaatgggctgcagagcgtcaaataacaattattgcggatgatatttatggcaaacttgtttataatcaaacgaaatttacgtcacttttagatttagatgaagctattagacaaaatgtaattttagttgatggattaagtaagacttatgcaatgactggttggagagtaggctatattgcaggtagcagtgagatgataaaggccgttaattcgctacttagtcactcaactagtaacttatcagcagttagtcaatatgccgcactagctgctctaactggtgaccaagcttgcgttgaagaaatgcggagtgaatatgaacaacggttaaatattttggtaccattgctagacaatgtgactggttttaaattatcagaaaagccgcaaggggctttttatcttttcccagatattagtgaagctttaaagttaacgggttataaaacagctaacgagtttgccctagctttacttgaacaagaaggcgtagctactgtcccaggtgaagcttttggttatccaaatcacttgcgaattagttatgcagctgatgtaaatcgagttaaagaagcatttgagagaatcaataattttattaagcaataaattgaaagccaacccttgaggctggcttttataattaataagttctttatcattaattatttcaataagaatttgccgatttctccgatattctagttgtatatattatttatatagataggggagaatagcaaattatgaaaaataacttgtttagacgaaatactgcgatagcattaactagtgtaatgttaactacaggggttgttactgcaatgcctaagcaagctttagcagaaagtaatgtaaatacagctagcaatcaaagtctaggagcaagcttagttaacaatacaggggtaggtgcatattctgaagaagttgccggactaaagcatggaacagcaattcagactatgcaagattctagccttcaatcaactagttcatcgatagttgatttggataaaactcaggggaaattttatgcattagctaatgttgagaacacaacgaatgaagaacagcattttatccaagctatagtattgccaaagttctacaaaggaagtaatcccgatcctaataaggttgatgtggtccttgattcaagtcaagttccggaaactggcttaagttttggcctcaaaaatgaaaaaattcaatatgccattaagcaaggaaaatatcgaaatttagatcgcttagcaagggaaaatcctggttttacttgggatcaaatcattggtataaaaattgatgggtacttagcacctaagcaaagcttctctggaaaaataccacttgctgttgcaaattataatcgcatgcaagatcagctgacagctttagccaataatactgctgaaaagagtatcatttctaatattggactgcgacaattttctgttggccaatcattttattactacaaaaatggtgaaattcaaactacatatgatggtcatttaattgctagagttggtaaggaaattactcggcttgaacagattattgcacaggcagatttaaagaaatatcaggcaaaaactttgagctttatggcagatggaacaagagtttatacttccgtgccggctgatattgaaaaattattaccagcaattacggcagacgactttatttattataactttggttcaagttatccatctagtcgggctctgtacactgatggcatttatgcaattaaaattaggcgcatttttgacgcaataaaaaatgatggctatagcgttaacatccagccaaatggtcgtgaaatttgggaacaatataaatattcacctgcaagtgatagtaattggattattgattatagtggtagcgacgtaacgcctacagagaatccattctatgttcaggttcaacaaatttttgacactaaagatataactatcaatgttggtgaaaattggaccaatacagataacttgcttaaagcagaagtttctacatataatccaagtaccatggctttaactaatcaacatactttgaagagtgatgaatataaggttgaagataatgttgatacaagtaaagcaggtgtctatcatgtcaaatatagttatgagattaatgataatgatatagttactaaaacggcaaaagtaactgtgcttgacaaaaagaagcaatctaataattcaagttcatctgcttcatcatcaagcacttcatcaagtgaaactagcaacaagcatagtgaaggaagcacgtcagaaaagagtagttcatctacttcatcaaaaaaagaagctgagttaccacaaactggtactacaactatatttgcgttagtaactggactgattgccgtaatctgctccattttacttgtcaaaaagaataaagaataaaaaaagagaggatagctcgggggagaactatcctctttgcttttgggccgtatcgtgggagtgatacgggttggagttgtaatcaattcatatagtaacttgatatgtgtattagggttcatttgagtaggaaaagttcgtatctgaagggataaaaactataaatgaataacatattactaaattgattacactattatcataaatgtaaaagtgacagttattcataacaacaatgtatatatgccaattttttacttatgaaaaaatgcacaagcatattgttatgtaccttgtacagaattcgatataattataggcaattaggggatacaataagaaaataaatatttcaagagcagagtttttaaggtaattgatgtaaagaagggagaaaacctgtatggttttaacatcattatttgattatcgcttaaaaacgctcgttgtcttagtaagaactaagtcttttactttaacagctaaggaattgtttatttcccaacccgctgtttctcaacagattcatagtttagaaaaagacttaggatttagattattttatcgatcaggaaaaagtattgaattaacagctaaggccatggaacttgtcggatatgttcaacgaattaattctgatagttcacgtgttctgaccgaaatacaaaaagatgataaaagaagattgtcaattggagcttctctatcattaagtagttttttattacccaatcttcttgccaaaacaattaatgatgagaaaactccaaaagtagatattgcaaatacaaaaattctattggaaaagataaaattaggggaattagattttgcattaattgaaggaaattttgataagtctgagtttgatttttacaagcttagtgattatccaatgactttagtaactaatccaagaacttatcccattgaccaatggtcggatattttgaagcaacctttatttattgggacagaaggatgtggaacccgagatatttttgaaaaactcttagcagcatataatttttcgttatctgattttaaaaatgtgattgaagttggaaatcctatcactgtaattgaaatgctaaaacaaggtgaaggtatttcatttttgtatcgacaattgattggtgatgatttaaaaagaaatgagctgatagaaatcaaaacaattccagaatttaacgttaagcattcaattaatttagtctttgctaaaggaagtagttataaagaacgctatcaacaaattgctacattagtaaaacacttataataatgatttataaataaagaagaattttaagagaatatatcaaattttcaaaggtaaactagttatgtaagtacttataaatatatttaggaggtggacatatgtcagataaattagcaggcaaagccaaggaagttgaaggtaaattaactggtgataaagccagagaagctcaaggtaaagctgaaggtttacttggtaaggctaaagaaaaaattaatgatgtaaaagaagatgtaatggataaagctaaagaaatcaaagaaaaacttgatgactagctttaactaatgctctgtttaaaatattgactcaatagcatcagtcatagcgcttttttattgagttaacttttcttaataataatccactttttagtaaagggctttcttagaggaaagctttttatttttgctaaaaaagatagaataatataagcaaaagtggaatatatataaatacatcttattaatgggcgcctgaagcaatgataaagtaatattaaggttaatattttagaaactctcagattgaaaattaaccttattgtatttcccaagtccacgttgtaatacccctacgtggcaaaaggttcttatcttattttagatagggcctttttattttttgctagtgttttccttaagagcgttttcatttatggattttttctgtaaaatgatagatatagctttgttaagtataacggaggatttatgatggaaacatttgaaaaagtcaaatggaagcagttcattttaccagttgtaattggcttggtaatttggtttattgcaccagtacgtccagctggaattagtcttgatgcttggcatatgttggcaatttttattgcgactattgcagcatgtattactcagccaatggcaattgctggcgtaacgttaatcggatttactatgactgtctgcttagggttagcgccaattgctgatgtgatgaaagatggtaaattagtccaaaaaggagccttgagtgccttttctaattcatcagcttggttaattgttatggcctttatgatttcgcgaggaattattaaaactggccttggtagacgcattgctttgtattttattaagtggtttggtaaaaaatcactgggtttaggttatgcgattggagcaattgacttgattacttcacctgctacaccatctaatggggcacgtgccggtggtattgtatatccgttaattaattctttagctaatacatttgattctcatcctaatgatgattcacgtaaaaagatgggggcttatttagtttttacagaatttcaaacaaatatcattacttcatcgatgtttatgacagcttgtgcacctaacttaattgctgtttcgctagcaggtaaggccggaattaacttaaattggatgggctggcttgctgcgagcgttgttcctgcagttatctgtttggtcattgttccatatttggtttataagctttttccacctcagattaaggaaacacctaacgctaaagaatgggccaatgagcatttgcaagagatggggaagatgaccgccccagaaaaagttatggccattatttttgcagcgactttagtattatggatgctctcaagttcaattaagcttgatgcaactactgttgcctttatttcattaactttgttacttttatttggaattttaactccaaaggatgttcttaaagaaacaggtgcttggaacctcttaatttggttatcaatcttagtctttatggctggaaagttgacccaatttggctttattgcctggctttctaaagaaattgaaataagtgtaaaagggatgaattggctcttagtcttggtgattttagccttgatcttattctacacgcactacttatttgcaagtgcaactgctcataacacagctatgtacttgccattgttaatcgtggctgtctctgctggagctccaaaagttttagcagctcagttcttggcaatgttttcagcaatcatggggtcaactacccactattcaagcccagcttcatcagttttatctgcttcgggttatgtaaaccaaaaagaatggtggaacctaagctttatcttcggccttctttacatcttagtttatggtgtgattggtttgctttggatgaaattgattggtatgtggtaaaaatatttaaatagctgatatgtttcgtttgttagaacgggatgtattggcttttttaatccagctgtgcagtaattttgtgattgataagtactttagaattcaatttataaaagttatgacatcataagttcatctaatatttttatcttatttttccggtaaaaatagccataatccaattcgaaatttctatctaattttttcactataaaaggttcacaggatttgctccaacacgcaggtagtagcatcaaggcattgtttaactgacaaaaatccacaaatgaatgattatattgtgagagttcgattatctttacttgcttatttgtttgtaagtatctgacagcgcaatctgtagaagaggagaggccatgcttcaatacggcaattgtataattagataaatcttgtgcagagataagctttttattctttagtttacaattaggtgggatggcgacagctaaaggaatttttgaaaagaaaaaccttgcttagccaaatctggggtataaattgtctccaataagtcaaccacatctgaaattgaattatagtctttgatttcagcaaaagatattgaaacgtcgatttgagatttttttattagtttttgaaattctagattttgagttaaaaagccagatcccaaggtaatttgtttcttaaaatactttagttcgctttgtgtttgtctgcacaaagctagcatttcttgggctctttttactaatatctttccagcttctgttacttttactccatgtgaagttctgattagtagtttaactccaagatgattttctaagttgttaatttgttgaaaaacagcagaaggtgatatgtaaagttcctttgctgccttggaaaaactgccattttgtacaactgaaagataagtctctaattctttatacataatttctcctcaatttctgctttaagtctagtcttaaaatacctttaacgcaatcgataaagcagaaagtttttttgataatataattaagttaaaagattaacaagcttttagttgggaggattaattatggaaaattatgacttagttgttgttggagcaggttcttcaggtattagtgcagcattaactgcagcagaagccggattaaaagttgccttactcgaaaaaggggataaatttggtggcgctgggatgtttggcgctcaaggattatttggtgcaaatactaaacttcaaaaagaagctggagttaattattctgttaaagatgcctatgaagaaattctgaattatactcaccatcgcagtgatgctaggatcgttaaagcaataataaaagagagtgcagaaactttggcatggatgagtaaaaatggcctagcaacagaattagtaactaatactcaagaagttcaccaaaatcatcctcgtacatatcatcaatatatcgataagtttaatggctttaaaaagatgattaataagttcgagaacttaagcggtagcttatttttaaagacttctgctaaaaagctactacaagataatgggcgtttatcggaaattgaaattacgcatgatggaactgatgaatgcatgaataccaaaaacgttattttagcagatggtgggttcatcggtgacaaagatttagtaaaaaagaatgtcaacatcgatttaaataacttgtatagcatgggagaacgtaaggcaactggtgatgggttacgaatgcttggagaaattggtggtgtgaataattacaagccactacttgaaaaccatgccgcgtcgattgttactaatgacaaaaatccgtgggaaaatgcttctttagcaacattatctacgcttccattgctttgggtagataattcaggtaaaagatttactaatgaagatgttgtctatgattttgcactttggggaaatgtaacttatacagctggtggatattactacataattattgatcaagatttcgtagattacatttcaaaaaatgagttagattggacaggctcatttgagagaacctttaccttactgcaacatcttccaatgactcataaggttggtccgatgaagactttaaagcaagaacttgatactgcgttgacaagtaaggcagttttcaaggctgatagtttaactgacttagctaagttacttaacattgatgaaaataattttgtagaaacaactaatcagtataataagttgattagcaagcatgttgatgatgacttttataaagatcagaaattcatgaagtttccaatttgtaatgggccattttatgcattgaaggctatttcaactactctaggaaccgtaggtggtggattagttaatgagaaattccaagctttaactgcagggagaaaagttattcctggagtatatgttgttggcaacaatgcggcggggatgttcgattcagcatatccaacaattgaagggttaagtaatggctttgcctggaattcaggtcgaatcgcagctaaaacaattgccaagttgaataagtaggtagttaaatacatcgcataattttatgtgatgtatttttgtatgcgcttccaaatagtggtaccataaaattaattagattaaagagagaaatgatatgagcaaaaaatttactatgcaggatattgcaaagattgcaaatgtatcgaaaagtgcagtatcaattgcgattaatcaaaattccggtattagtgataatacaagaaaaaagattttgaaaatagcagatgaattaggctataaaaagtcgagcacaaatttaagtttcgagaaaaagcttaggacagttgatttttttatgactgttgaagatattcaacaaaataatttcttctttttacggaatgcagtggagaaaaagggaaaacagctaggaataaatatttcctttaaactgttacctaaaaataaattaattagccaaactgaaatcatttgtgatataccttcaatatttttagctacaaatttctcaagtaaattagttaaagctcttcaaacgaagtttaaatattgtgtttttctagatgtcaacttagcaaatgttactgctaactttgtagcaatagacaattttcaagaagcttattcaatagttgaatacttttataaaaagggatgcagaaaagttggatatttaggtgctagaacgctaaatggaaattttgcagaaagacgatatggtttcaattcggcaatttcagattttaatttatcatttacgaattttgattttatagttggttcattaagtgatgatgcaattgatagtcaagaaatcgccaaaataagaaaaatgaaaaatttggatgcctttttatgcgaatcaaattgccaagccttgaggttaacaaaagaattacaaattttgaaatttagtattcctaatgatgtaattgttgttgggtttactaacttattggattctaaatattggtttttaaatatagataaaaatcaatttttattagatcaaatgttaaatcaggcaatttcacaactacaaaatatgataagtacagtaaactggcatccacaaagaagtttgataagttgggaacttaaatttagttaattttagtaatatgggagtaagaaaatgaaagctaaaatgagtgatattgccaagaaagcaggtgtttcaattgctgctgtttcactagttttaaatggtaaacccggagtaagtgaaaagacaagaaagaaaatttttaaaattatcaaagaaagtgactatgtaccattacgacaaaaaagagaaagtactagagtaattgcaaatgtaaatttaataattataagtgatcaacatggggtagttaatgagatttaccaaaagaaccctttttttgatacattagttcaatgtactgcggagcatattgataaattcggtggcactttgcaaattaacacagttcaaatagaatctttacatgaagaaattaatagaataattagtagaacaacggttgtaaatgcgattgttttggcgactgatttggatgaaaatgatattgattttatagaaagtaaaattaaaaatgttgttttcgttgatacatcatttagaaagctaagagcagatttcgtaactccagataattatcaaggggcgtatgcagcaggaatgtttttattaagccacaattatagaaggataggatatcttgcatcgaataaagcaactcagaactttttatcaagaagagaaggaataagagacagtcttgctacacaaaacataaaattggctaagaacgatttttatgtagttgattttgcaaatttattttctgagaactcactaaattgtatagattacaatgatttacctgaagcctttttctgtgagaatgatattattgccattagattaataaaggaattaacacatagaaattttagagttccacgtgatattggtataatgggatttgatgatgtatctacagcagcattatgtagtcctgaattaactacagtacatattccaactatccaaatagttgaacaagctgtaagagatttacaagcacaagttgcaagtaaagactttaggggacaaaagacttttatcactactgaaattattgaacgagaaagcacttaatttaagtaaaacaaaaaagatattaaccaactataaactgagagggagcctacaaagctccctattttttgtgccttttaaagcagcaactaaacttttacttaaatagcaattacttttttagtaattattgtaagcgattacatataaagataaacttaaattgtaaaaagttaatagctgagtcggagatggaaaaatgaaaaataaagtttgtgttttaggaagtattaatttagatactacacttcatgttgaaagaatacctcttccaggtgaaacagttccagtttctgataaaagttcagctccaggaggaaaaggtgctaatcaagcagttgcatcagcaagatccggggctaaagtacattttattggagcaattggtgatgataattctggtcaaactatgcttcgatctttgaaggaagacaatatagatttgactaatataactaagtcagataaagccggtactggtacagcaactattatgttagatgaaaatgggcagaatagtattttagtttatccaggagctaataaagaaataaatttaactcaaataaagaatgcagaatctttaattgcaagtatggattttattgttgcccaatttgaaacaccaattaaggagacaactttagcattccaaattgcacataaacatggtgtggttaccgtattaaatccagctccggctagtcatattccagatgaactcctaggagaaacagatattatagcccctaatgagacagaaagttttgctatcactgggataaaggctgactccttaagttctatgaataaatcagccaattattttagagataaaggtgttaaagcaactttgattactctgggcgataagggagtttattactcatatgataagcaagcaaaaattgtcccagcatataaagttaaagcagttgatacaacagcagctggagatacttttttaggtgctctttctgcagttttgaaaaaggacttaagtaatttagaagtagctatcgattatggtgagaaggcatcttcacttacagttcaaagaaatggagctcaaccatctattcctactttcagtcagattaataaattttatggaggagaaaaataatgaaaaaaattggagttatgaattcagatatttctcgtgtaattgctaacatgggacacatggattggttatcaattggtgatgcagggatgccagttccaaaagatacagaaaagattgatttatgtgttcaaagcgaattaccttcatttatagatgttttaaagaacgttttaattgaattaaaagttcagaaaatttatttagctgaagaaataaaagaacaaaatcctaagcaattagaaaatataaggtccgttttacctgatgtggagattgaatttgttccgcataaagatttaaagaaaatgcttggtaatacccatgcatttataaggactggcgaaactacgccttactctaatattattttggaaagtggagttaccttttaatgtaaaggggtgaaaccaataatgaaaattgaaatgactggcataaaaaaagcctttggttcgaatcacgttttaaaaggagttaattttactattaattctggcgaagtacatgctcttatgggtgaaaacggtgctggtaaatctacattaatgaatattttaacgggacttttgagtaaagatgatggctcaatcaaggtggatggaactgaaactagctattcaagtgcattagaagctgaacatgctggaataagttttattcaccaagaaatgaacaacttcccggatatgtctgttgtagataatatgtttttaaataaagaattaaaaacaaaatttggactcatgaatcaacgcgccatgattaaacaagctacagaatatcttaatcatttaggtgcccaaattaatgttactcaaaaaatttctaacctaactgttggtcaacaacaaatggtagaaatagccaagtccttaatgactgatgccaaaataataattatggatgagcccactgcagctttaactactaatgaaattaagattttatttaagacgattaatgaattaaaggcaaaaggtgtaggtttcatttatatatcgcatagaatggaagagttatgggaaatttgtgataccgtaactgttatgagagacggagtttctatcaacacatataaaattaaagatgtgacagagaatcagatagttcatgatatggttggacgtgacattggagattattatccagctcgtaatccaaagttaggaccagttgctttgaaagctgagaatttatgtggtgaaaagttcaaaaatattagttttgaagttcatgaaggtgaagtattaggattttcaggactaatgggtgctggtagaacagaaactatgagagcattgtttggaatagataaacttactgatggcaaagttttggtccatggtaaggaagttcatataaaaaatccaagtgatgcagttgctttaggaatcggctttttaactgaagatagaaagacagaaggattggttttagatcaatctttgcgagataatattgccttaccaagtattgaaggctttaaaaagcatggaattattgatgaaaaaacagaaaccagttttgtaaatatgttaatgaagagattaacagttaaagctgaaaatccatttgttactgctgggagtttatctggtggtaatcaacaaaaagttgttttagctaaatgggtaggaagtggagcaaaaatattaattcttgatgaaccaacaagaggtgttgatgttggggctaaaaaagaaatctatgaattaattaatcaactcactgatcgccatgtagcagtaattatgatttcaagtgatttacctgaagtattgagtatgagtgacagaatagaagtcctatatgaaggtaaacaaatgggaattgtagatgctaaagatgcaaatcaagaaaaaattatgaaattagcaactggaggaaaataaaatggataaagcaagaaaaaaattggatttatctaaatatatggccttaatagccttagtagttttagttattctgataacatttttgaatccgcaatttattgcaccttcaaatttgatgaatttattaagacaatcatcaattaattgtttaatagcttttggtatgacctttgttattttaactggtggaattgatttgtcagttggatctgtcttagcttttactggtgcagtagcagccacattaatattaagtgggacacctgtatggctagcatgtattgtatgtcttgttttgggagcagttttaggtggagtaaatggatttttgatttcttatggtaaagtaactgcatttattgccactttagctactatgactatttggagaggagctacttatgtattcactggtggtaatccaattaccggtccaaatatgaataatagtttcttcttccaatttattggtaatggttatctcttcggtatcccatttccagtcataattactttattaatctttgcagcagtttatattcttttgcataaaactgcttttggtagaaaaacttttgctctaggtggcaatgaaaaggctgcatttgttgcaggtgttaaaactaaaaagattattgttgtaatttatgtaatatctggccttcttgctgctttagctgcattaattttaacttctagattaagttctgctcaacctgatgcaggtacttcttacgaaatggatgcaattgcatcagcagttattggtggtgcaagtcttatgggtggtaaaggtagaatgcaaggtactttagttggtgctttactaattgccactttaagtaatggtatgaacttattgggtattaacagcttttatcaacaaattgttaaaggtttagtaattttagtagctgtaatgattgactcacaaagccaaaagaagaatggataaaacagggaggtaattattatgttttttaaccatatttctaaaaatcttactaagatagcaactattggatctgtccttgtaatgggtggaggacttttaggtggctgtggtgccacaggattaaatagtgatgcaggttcttctacatctaaggtggtaaaaaaagcaccaagcaagttaaagattggggtttcaatttcaactttatccaatcctgtatttattacattgaaaaatgaattacaaaaatatagtgataaaaaaggttctaaaattatcattaataatgcaaataatgatacttcaaagcagaataatgatgtagaagatttaattcaacaaaaagttgatgcgattattgttaatccatgtgattcttcagcaattagtacggtaattcaaaaagcaaatgatgctaaaattccagttatttgtattgaccgtggtgctgacagaggtacagtagtatcaactgttgcttctgacaatgttgctggtggtaaaatggcagccgattatttaattaaaaaattagggttgaaagcaaagattgcagaattacaaggtataccaggtgcatctgcaactcgtgaacgtggacaaggctttgataaaattgctgacaagaaattgaatatcgtttctaaacagactgcacaatttgatagagcaaaaggtttgtcagtaactgaaaatattttacaagctcatcatgatgttaaaggtattttctcacaaaatgatgaaatggcagtcggtgctgctcgtgcagtaaaagcaagtaaaaaagacatcgttattgttggttttgatggaactaacgatgcattaaaattaatcaaatctggtcaaatgactgcaactgttgctcaacaatgggataagatggctgatacttctttagatgctgtatatgattattatcaaggaaagactgtcaagaagaataacttggtaccagttcgtttgataacaaaagaaaatgttgattcaatgttaaagtaaaattttaagtttgaatttaatataaattaaaaagattgattaccataggtaattaatctgagaccgtaaaatagtttgtgtaaggatgaattattccttaatttaatttcctaaaacattagaaaaaggagttcctttctcgtatgattggtttgaacaaaaaaaacatacagaaagaagaactccttcatgaatgattttaccaaaaatataactcaagctctattcaatcaagataaaattaatgatttgcttcgtcatgaaatccaacaagctgttaatgacatgttagaatctgaactgactgcctttttaggatatgatccctatgctagaaatggctggaatactggtaattctagaaatggtgcgtatttccgtaaaattgatacccagtttggatcaattgaggtacaagtgccacgagatcgcaatggtatgtttcatcaacacactctgccagactataaacaacatactgatctcttagaagatatggttataaagctttattctaaaggtgtaaccactagagaaatagctaatttgatcgaaaaaatgtatggcagtcattatagtccagctcaagtgtctaatatctctaagcaaatgattcctaaagttgaggcttatcacaagcgtaagctgagcgataagttcttttgtgtttatcttgatacaacgtatataccgttgcgtcgagaaacttttgaacgagaagcagtatatattgccattggcatcaagcctaatggtcacaaggaagttatcgactactgcattgcgcctagtgagaatattgaagtctggacggcgttgctccagaacatgaaatctcgtggtttaaagcaagtagagcttttcctttcagatggcgttgtcggcatgaaagcagcactggcaaagacctatcctcaagctcatttccaacgctgcttggtccatgttatgcgcaacatctgcgctaaagtacgcgtggacgatcgcgaggcaatcatgaacgaattcaagcagattcaccagcaagccaataaagcggctgctgttgatgtattgcatgctttttatgccaaatggaacaagagctacaatcgtgtcattagaaacctgaaagacatcgagccagacctgcttgttttttataattatcctaagcagatcagggcttcaatttactctaccaacatgatcgaatcctttaataacgtcattaagcgcaaggctaagcctaaagcggagttcccgactgaacagtcgcttgatacttttattggcatccaagcaatgagctacaatgaccgctacttcaaccgaattcacaaaggctttggtcaagtccaggataccttagaatcctattttgaataaataaaacgttaaaaaaacaatttacgagaaagatctatttacacaaaaaatttgacagtttcattaatcttttttgcttctataaatatattttactgagtaattatttactatcatatatcatcaaagatccataattatatttattacgtgtttctgagtattcaaatggagtattgtcatccaaaaattttatttgtcttacacataaaacaggatcatcttttgaacaatctaaatattttatatcgtaagcatctggtttttcggcagtaattattctgttagccttaccaaagtttaaatgtaagtgttcctttatataaccataaattgatttatgtaaaatatcatctgtaatacctggaataactttaactggcataatagtatattctagtttagctggaataccatttaacaatctttgtctgataatatcgtaaactaggtcatctttagctagtcttagaacttggcattcttcatcagtcggcattcgttgatcaaaggcgatgatatggcttgtgacgataccaccacctaatgaatgattggtaaagccattagttttattggcatcagaatctataagaagtttagatatatttttagatttgatttttgtccagtgacctttaattggatcgatgatttctcggtcttttaatagattgaatgcgcgtgaaatggtaactctacttgtgtcatactctttggctaattctatttgtttaggcaaaaaatctttatattcaccagaaatgatttttcgttctatttcagtagcaatttgttcatactttttcataaatatacctattttcatatgtaaatataaaagtttacatatgaattgtagcgccttgtctgtaatttgtaactatctataattaaaaatgaatatagcgcttacaaggaggggtaaaaatggaaaaattcttttggggaaattcaacttcaagtatgcaaactgaaggtggatggaatgaagatggaaaatctaaatccgtttatgatattcggacggcaactgaatcaagtagtgattggaaagtagcaaatgacaattatcacaacttatcagaagatttagatctgatgaaggatcttggcttaaatatgtatcgttttcaagtttcttggtcgagagtgatgcatgatggagatggcaatctcaatagcaagggattggaattctatgatcagttagtacaaggcctacttgacagaggtattgagccaatgatttgtttatatcattttgatatgcctttaaagctagctaatgaaggtggattcttaaataagaaggttgttgatgattttattaggtttggaaaaattatcattgatcattttaaagataaggtcaaatactggattacctttaatgaacaaaatttatactttcaaccaggagctactcattatgcagtaggaattgacttaggacgtaaagagacaatcgaagatatatatcaaatttctcataatatcatgtacgctcacgcatgtttagctaattatttacatgatacttctaataataagattggtgggatgcttgcatatgctgcaacatatccatctacatgtaatccgtctgatcaattgctagtagctagatttaatgaatttgtgaataattctttactagatgcatttgtaagaggaagttactcaccagcagtaattagctttgtaaaaaggtaccatcttcatttagatattgaaaaagatgagttagcagaaatcaagaagatgaagagtgattttatagcgtttagttattatcgaacggatgtgattgatgcaagtaaggtaccagtagattgtgctcctaattattatcttaaatatggtaagacaaggaataaatatactagaagcaattattgggattggaatattgacccacagggctttagaaaggtaatggatgatatatattatcgatatcgagtacctgttttcccaatagagaatggaataggtttactagaacactgggatggacttcatcagatagatgatcaattacgtattgattatatgagagaacatattaatgaattgaaaaaagcccaaaaagaagacggagttgaagttttaggatatttaggttggggattgattgatattttaagctcatcaggaaatatggataagcgctatggagtggtttatgtcaatcggtcgaatcacgatttaaaagatatgaaacgaattcctaagaaatcattttattggctacaaaatgtaattaaaactgatgcaaaattcatttaaggagaagaaaaatgaataattcaatgcaaaattccaaattaatgcaaggctttaccaaatttgctgttaagcttggtaatcaaattcatttgagaagtttacgtgatgcttttgcaacaatcatgcccctatatattctggcaggacttgcagttcttttaaacaatactgtttttacttggatttttaaaggtaaggcattagaacgaattcaatattggggtgtagtgattaccaatggtactttaaatatttcaggtattttaattgcaggattaataggctatcaacttgccaagaatagaaagtttactaatcctcttgcaagtgcaatggtatcaattgctaccttaatagttatgatgccgaatacagttcaagttattccagatgttgctaaaaaagctgtgtcagtatcagcagtaatgccatttagtaacttaggaacaggggcaatgttttctggagtaattgttggacttcttgcaacagaaatgtttgtaaagttgtcgcaaataaaggcgttacatattaatttaggacaaaatattccaccagcagttggtcaatcatttgatgtactaattcctatactgattgtaatttcattttttgctgttatttctgcaatgctaaataatatggcagggatgaacttaattaatcttattactacatttatccaagagccacttcgccatgtaggaacaagcctttggggaactattttactttattcattgggaaacttactttggttatttggtattcaccaagcagttatttactcttcaattcttgagccattattaatcgttaatattacgcaaaatattgttgcataccaagctcacaaggcaattccaaatattattaatgtatcattagttcaaagttttggcttaattggtggatctgggtgtacattatgcttattaattgcagtatttttagtttctaagaataaggcagcaagaactgtagggaaacttgcagttgcacctggtatttttaacattaacgagcctgttatctttggatatccaattgtttataacatttctatggcaattccatttgtattgattccatctttagggatattgatttcatataccgcaactactttaggattgatgagcccctgtgtaattcaagttccttggacgacacctgtatttttatcatcatttttagcaactgcaggagattggagagctgtaattgttcaattaatagttgtagtgttaggtgtattaatttacattccatttgtaaagatgaatgatgcagtagttgttgcacaggcaggaaattaaatattaaataattttttgattatcaaaatctgtatatttcttgcaatcgcttacaaatcagaaataaaattatcatgtacacatagttagtgaggtggtaaaaatgatgaagaatattttattattgttaattgtagcaataaatgcatattttttagtgatgtttttgctagatattaacaaaaacaagaagaaacttaagcaagaaaaagcagatggtcgtattttgccgtttacgtctttcattatgtttttcttatctacttttgggatttcagattttgcaataggaacagtgctttatccaaaattaaattgggtttcaattaaaaaattaccaggtactttaaatacagaatgcgtaattcctgttgcagttatggctttgagttatattactgcaattactgtagatatcaaaactttaattgtttgtattgtttgccaggttataggtgcttatatcggaccatatttcgtagtaaaacttcctgaaaaggtcatcaagcaatttattagtattggcttgattattgcagctgtcttaattgttgctggtcaacttaatatgattccttcaaatggaactgcaactggtttaacaggtggaaagctaattttagccggctttttactttttatatatggtgcgcttaataatatcggtattggatcttatgcattaacaatggtgactgtatatcttttaggacttaatcctgtagctgcgtttccaattatgatgggtgcatgtacattttcagtacctattggttcagcgcaatttgtaaaatttggtgattatagtcgcaagattacactattcacttctacttttggtgtattaggagttttagcagcagtatttttggttaaatctcttgatacatatatgctaaagtggttggttgtcattgtcttgctatatagtgcaatttctatgatgatggcaaagaaagaagaggattaaaatgttatatttaacaaaagatgatattcaaaaatgtttttcaatgagagatgcaattgaagccgataaaaaggctttagaactttattcaaaaggaaaaacttcgattcctcttagaacgaatatcaatattccagaaaaaaatggtcaaaatttgtatatgccaggcttcgttggaggagaaagtgcagctgcaggaataaaaattgtatctgtatatccagataatataactaaggggttaccaagtgttccagctacaatgattgtacttaatccagaaactggtgttgtatctgcaatgcttgatggtacatatcttacacaattaagaactggggcaatttctggtgctgcaacagaattaatgtcaaataaagattcctcaattatggcattgattggaactggtggacaaggagctgcgcaattagaagcggtattaactgtcagacctatcaaagaagtgcgtatttttgatattgattttgaaagagcaagtaagtttgctgaagatatgaaagaccattttccacaagtcaaaatgattccatgcaaaagtgcggaagaaacggttacaggtgcggacgtgattacaactgtgactacttctaaacgatcaacttttgatgcaaattgggtaaaaaacggtgcgcatattaatgctgttggagcatatactccagaaatgtgtgaattgccaagtgctattttacctaaagctaaaactattatttttgatactttagatggagtgtggagtgaatctggagactttttgcaaccactagaaaaagggttaattgataaaagtattgttaatggtgatcttggacaactcgttagtggggaaatcagtggcagaataacaaaagaagagatatcaatttttgaaactgttggaacagctgcattagatgtatatgttgctggacaaattgttgataaagcaaaaagtagtagtgtaggtaaagaaatctaaaatatgtataaaaggagcagataaaaaatcagctcctttttgtatattaatctttatttattaatttttcagattggtaggccctgatagcgatatataaattcattaagttatctgtatttttaaaatctacatttatcaattcttctatcttttttagtcgggcacgtaaggtattaatatgaataaacagctgcttgctagtttgagtgtaggaaaatttgttagaaaagaatatagacagagtttgaacaagatgagtatcgtgttttttatcgtatgttactagcggaaatataaagtgcttatacatatgattcaaaaacaaataattaatatctcctttattattagtaaataatttaaaaatacctatttgttgatatgcttgaatatttttagaagagttgctagatttagcaaattgaattgctgctagggcttcttgccaagctgtattcagattccaatatttgtgatatgaactaattccaatatagaattcaaaaatatgcaatttatctttgaggatattagcgatttgttcaacattcttgtctatatttttattagttgagaatagaacaatccaatgataatccttaataaataccaatggattaaaaaacacctctttaaatttattaatttcgtagtagaatttaataaattctctttctggctgagaataatcagttaccttaaaattggagcttataacgacagctaaataattagtattaattcgttgtccaagagttaaactggatttttcaaggacagtttgagagggagacgaaagttttattaattcctcaaaaacactattttgtagaaagatattgtttgtttcaatttttttaattaggctgtgttttaaatagaaaatagattttatattttgacatttcgaaaacaactcaggaggtattccttctgaaaaatgtttgcttctaaatacaaaataagattctaactttccgtcttcaaatattggtaagaaatataatgaaaaatctaattgttctaaaaatttactcttaaatacaaagccagtcacggtttttccagataaatcgtgacctaaaggctctattgatactatatttttagcagaaaacttttcaaagtattcattccaagcccaatcatttgaaaaatctaaaatgcacatgtttttatctacaattgcagatgaaagttgaatttttttataaacaagattgcagagactagtttcagttgaatgggttgaaacataactgattagttcttgatagaatttttcattttcttttagaagctgtgttcgatgcgtaatagttatttcttttaatgaaataataacatcactccagggatgaaagtcatcgattaatataatcggtattttataaaaggtaaaaaggtcaatattgtcggaagttatgtatttcttatatttctttttggtaattatacctgcaatatctttttggtgtaatgattctataaattctatgtcaatttcagttctggcaaaatctccaataattaagagctcatctttgtggacccatttttcaattcctttaacgtccataatagttacagattcaatttctttatctaacgataatttgggtgttgctaagcaataattattaaatacattactagtgactaaatctttgagtctaattttattttccataaataattccttgtataaccacacatattaagcgctttctttttgtatgttatcataattaatttcctcatagaaataatttacacttttcagtgaagataaaagtttcacagaaaaggagtggaattatgagaaatcgttttaaaggaaaagatttttaagcttttaaggacatggatcgtgaagagatagagttcattaccgatttgagtctagactttaagaaaaagtggactattagagaaccacatgaatatttaaagggacaggtatgggctgccttgtttgaaaaaaatagtacaagaacaaggaatgcttttgaacgtgcagctgctgatttaggagtaaaagttgtttatttgcggccagacgaaatgcaaatgacacgtggagaacctttaaaagatacggcgagaattcttgatagatattttgatggattgtttattagaacctttggccatgaaatcgttgaagaatgtgcaaaatggatgcaaaatccagtaattaatggattaacagcactagagcatcctactcaaggaattgcagatttgatgacgattaaagagaaaaaaggacattatcaaggattaaaaatctgctatgcaggtaatatttataatgttgcctatactacgatgattttttgtgcaactttggggattgacctatcaattgcatgtccagagggcattgaacctgatgaaaaaatgatagcagaagctaaaagaagagctaagttgtcaggtgcaaaaattgaaatcacatctgattttgataaagcattatcaggtgcagatattgtatatggaatgtcgcaatatagtatgggtcagtccgaggaaaaaataactcatcttaaagaagcatttaagccatatcaaattaccatggaacaattaaaaaaggctaaatcagatgctatttttatgcattgtttacctgcacaccgtggtgaagaagtaacagacgaagtaatggaatgtgatcaatcagtaatctttgatgaaggtgaaaacagaatgcattcaattaaggctattcttgctgcagtagcagattagattcatccagaaagtggtggggctaatgaaaaagaaaaggaaatttaaagcacccaatacctatgtgattatcttttacgtgttagtgttagtggcaattttaacatggataattccaagtggctcctattcttatgataaagcaggaaaagttattgcaaattcttatcacagtgtagctacaaatcggcaaggtttttgggatattgtgatggctccaattattggaatggttggaaacgaaaaagtttcaggagcaattacaatttctttaaacgtaatgttatttggtagttttcttgaaatgatggatgctacaggtgcaattaatatagctttgaaaaacgtagcaaaaaaatatcaaaaaaattactacgttttaattactgttttaacttttttaatggggatctttggaacagtacaaggagcctatgaagaaggctttgtttatctgttaatgtttttaccaataatactatctcttggattagatacgatagtagctctgatgattgtaattttcggtactcaagcaggctgtgctgcttcaattgtaaatcctttttcaactggtattgcgtcagggctggctgggattagcccaggtgaggggataatatttagagcgattacctttatcattttaatgacactttgttcagctatgatctgtctatatgctaaaagtatcaagaataatcccgaaaaatcagttcaattttttagaaaaaaggaagatttagaagaatttgctaaatctgatgctggcaagcaaaagcttgatagtaaacaaagaaaaatctttatcatttttattttaactttcttgataatgatagtttcattagtaccatggacttctctaaataaaaactggacattttttgttaatgcaactaaatggctgaataataatttaattactggaacaattttaggtcataatttggttccatttggtaattggtactttaataaaattaatgggttacttattgttatgactatattatcaggtcttgtaatgggatatgatattgacaaaataattcagatttttattagaggtgcagcaagtttagtatcaactgcttttatagttcctcttgctagaggtatccaagttttaatgacagaaggtaatataaccgatacaattttaaattctactcaaaaaacattaggtacattgccaccaataatttttattttggtttgtttcttggtttacattctattagccacttttataccaagttcgacaggcttagctgctgctactatttcaattatggcaccattaggcatgtttgcaggtatttctgcagctaatatggttgtaatttataattttgctctgggatttgttaaattgatagcaccaacttcaattattgttatgacctgtactcaagcagtacatgttacctatggggcatggctgaaagcaagttggaaatatacattaggctatttagctatgttgattttattattggttgtttctgtatttgtaatttaataaggagaaataaaatgacagaaaaagtttatgtccgcaatgctactaatgaattgaaaaaggttatagtctgttcaccaaaattttataaatttaatggaattaacgaaattacaaaatcttggatggaaaaaggagaaaaagaacataatgagttaatggttaaagaatggcaaactctaattgatgcttataaagaaaatggagtagaagttgtcgaaatggagccccagcctgaattagaggttcaaacatttgctcgtgacttcggagcaatgattaaagaaggtgcaatcattggtaaatttagacatccagctcgccaaaaagaaacagccgtttatgaagcaaaattgaaagaactaggtataccaattgtggctagatgtaatgctggctgttttgagggtggagatttctggatgattgatgaacatactctagcatttggattagtagatcgtactgatcaagcgggtgttgataatttaagagaacaacttcaaaaattcggatatacagttgttggtgtcccagttgctccagaacatctacatttagatatgtgtttcaatattgttgcacctaaagtatgtttagcaactaaaagtgtattaccattttggttcttaagaatgcttgagaggcgtggttttaatattattgatgtaccagaagaattgattgctaaacatggttgcaacgttcaagcacttggcaaaaataaggttttagggattgcaaataatgtctccgtaaatgaaaagttagaagcagcaggtgtagaagtaattaaattacctttggaacagattcttaaagcaggaggcggaccacactgtatgacttatcctgttcaaagaagttgataaaaggaggagcttaaatgaagattgtaattgcagattaccctgactcaatgatgccaactcatgaattagaaaagaaaattttaatttctggtttaggtagtgatacaaatatagtgatttttgaatatagtgataataaacgtgaagaattttttagggtaattagggatgctgatgctattttaactgcttttacaaaaattgattctgaagttatggatcatgctcccaaattgaaagtaatatctattaatgcaacaggatatgataatgttgatttagaagaagcaaataaacgaaagattggtgtgtgtcctgtaggagaatattgtactgaagatgttgctgaatttactattactactagtttggcaatggtgaaaaatttaaaatcatatatttatgatattgataaaaacaagcagtggagatacgattatgtaaatcctaatccaagaatagctgatttaacaataggaatctgcggatttggaaaaattgggactcgtgttgctcaaaaggcaaaagcattaggaatgaaggttatcgccactgatccatttactaataataaattagaagatgttgaacttgttactaaagaagaacttgttgctaatgcagacatcattaccaataatatgaacttaaacgaaacaaaccattcatattttaattatgatgcctttaaattaatggagaaaaagccttatttaattaatatgggacgtggagcatgtgtggtcgaaagagatttactccaagctttagatgagaaattgctaaagggtgcggcactcgatgtcttaagcgatgaaacaccagatttagagaaaaaccaattggttggtagatcaaatgtcctgataactccacatgtagcattttattcaacttcttcattagaagatttacaaagaatatccacagaaaatattgttaattatttaacaggacaaaagcagaaagtttttaagttggtaactgacctttagcaactaataatatagagcagattataaaaactaaaaaatcatgtatcaatcggaggtacatgatttttttagtttgatatagtatcgcaaaaataattccctttatatttaaatagctcttctcattttttatagtataaaatttatgtaaaataacccccacaactttaaaactcaaaaaaacaactatttgtaaaatacaaaatcagataatattcataaaatatattatctaatatatataagtacaaaccggagtaatataagcacctcttatgtaacacgcttacattagcgtggtataggggggggtagccaccatgctataaaaaatgattttccttaatcttgctaaactagaaacatagaaatgtttttagttttagaaaggattgtatattttttatgggagaaaaagataaaagactacgttattcacttagaaaaatgaaaaagggtggagctgcatcttttgttataggtgcggtaatttttttaagtgcagtagaactaaattctaaaaatgtatacgctgctgaggtaagcagtgctgaagcaagtcaatcacaatcaagtgctagagcagtatttgcaagttcttcagcatctaattcaactgttgcacatgaagataaaagtcaaagcacctcaatttttatctctaaaccaacagtaagtgaagtttttgttggagatacagccattaaaggtaaaactagagctaatgctcaagtggttttatataagggggataatcaagttcagactacttcagcagatgcagaaggtgggtttactttcaatcttactaatgctgtaagtgaaaaggataattactctgttcaagcagaagtagatggttcacaaagtgagaaaactgttattagtccaattgtacactcaaatactaagccattagctaatgagcgcaatgcttataccccatttgatgtttcattagctaatcgcggttttaaatatgatgatgccaagcatgaatcatacattgaattgaatcttgctttgggattattatctgaagcttatcttgatttaaataatgccaagatgttctatcaaattgacccagctttggccccatatattgataagattgtcttttcaagagcacttttgtcagatggtgaagcaactaaagatacctctaatgaagtacctggcgcaaccaatgtttggactagtggtgttttaactacccaaaatggtccaattagagcagccttagcgggttcaacatcaagtacttacaaaatctacttgaaggctgatacaccaaattcaatcttatctaagcctttatcttttacaatgtgggcaagatacagtagtggtcatgacatggtttctgattttagtaaaaatcttatccttaatgataatgaaactacaacttttagtagtaataacttctttaaatcattagatattgtaaataatgacggtcctattttagacaatatgagtgtcgattattctaataaaactgtgaatactcgttatcgtgttaatggatcattactaggcgataagagtaacttaactcttagaattagaggaaatgacaacttactaaagcttattgataaggtcaaaattagtaataaaacatacactttagctaataataccctaaagtatcgaactggtgaattatatattaatgacatcggtggtagtttaggtttcttatcttctttatcaaatcgtcaagacttcaatgtgactttctacttaaaaaatggcaagtctttcgctgatgcattaacttctgaatcacaaaagtttgatttccaatttggtatctatgacacgactgattatgctactgcatttcattcgttagatacagtaacaaatagcttatcaaccaaaacttatacaactggagataagtataataatcaaacttatgatttaagtacatttaagacaattcttgataaattaattaagcaaaaacaagataatccaacaacttatttatcttttgaagataaaaaaatatctgcaactgaaaacaatccatatgaagctgttaaattagcacttgaatctccaacttttactaacatatctattgctaagtctttggtaaatgcagctgattgtaagcaactagataatacagcaaagtgggcttgggataatggagcaagagatgacttacttaaatatcttgatgttgcaactaaagttgcaagttatattcatttagaatttccaactaaaccaactgatttttctggattactcttaaggtacactcgtgctggtacatttatttctgcagttgatagtgacagagatggtgtcctagatattacagaaattgataattcttatggtatgaatccatcagtttacgatacagatggtgatggtattagtgatggacaagaattacgtgaaggccgtgacccaggcgttgctccgtttaattggactgatgctaatggtaatcagctaagtattgatgtagatactacaactatctcaggacagttaggtaaccacaactatcataatgaagttatgcaaccaagaactgttaacttatataaagttgatgatactggtaagaaaacattaattgcttacactacttcagctgttgatcaaaatggtagttttacattatcaaaattcactttgaataagggagacaaactcgttattggatatgttactccgagaactaataagtctcttactgataaagatacaattttgcaacaagcctttccaactgaacaattttctaatgaaattattgttaaaggaaagcaagttacagttactttcaatatgaatggtgttagtgatgatgaaaatcaagatattaaagtagaaaaggactcaagttttaataaagatagtttaactttgccaacaccaacgatgaagactggctattcatttaaagaatggaatactcaagctgatggtaaaggaactgtagttactgcagatacaatctttgatactgacaccactgtatatgcaattggtgaaaagattaaattaccaaatccaaccaacattaaggctgaaaccagaactgatgataagaccaagagtcaagaaactatcatcactggtaaggcaaccccaggtgccactgttacaattaaggataatttgggtaatgaaatcggcactggtgttgctaatgatgctggtaactttgaaataaaaactactagtccacttgcagaagcaacaaaagtttcagttgaagcaacaaaaggtggtgaatcaagtgatgccgttgaagcgactgttgaacaaaataacttccaaaagggcaatcctttaattcaacctgcctctccaacagctgttacagctgtaacaatcaaagctagtgatggtactaataattcaacaactgttactggtaaagctgcagctggtgaaactgtgacagtgaaggatagttcaggtaatgaaattggtacaggtgtagttggcgaagatggcacatttactattacaaccaataagccaattgctgaaaatgaaaggattcaagttgttgtaaccaaagatgacgctgaaagtgaacccactgaagctgttgtgactgctaaaactgaaccaacaaacccaactgaagtaacggctaaaacattacctgatggcaactcagatagtactattgttgctggtaagggaaaagctggcgaagtagtaactgttaagaatgatgctggtaaggtaattggtactggtaaagttagtgatgatggtacatttagcattaagactgatgaagtaattgaaccaggaaaacaagtttctgttattacaactaatgatggaatggatagtattccagttcctgtaacagtatctggtgaaactatcacttcaattaaacaaagtgctaaagctgcagttgataatttaacttatttaaataatgcccaaaagcaaagtgctaaggatgcaattgatagcgcaaatacagttgacgaaataactactgcaaagaataatgcagtatctactgatacaaatatgaaagatctatcagaagatactaagttagcagctgataagacacaagatccatatctcaatgcagatttagataagaagcaagcatatgacaaggcagtagaagaagcacaaaagcttcttaacaaagaaactggaaccagtgtaggtgctgataaagatccagcagaagtggcacgaatcaaacaagctgttgatgatgcatatgacgctttgaacggtaactctagtcttgatgatgctaagcaaaaagccaaagatgctgttgataagaactatactaatctgaatgataagcaaaaagaaactgctaaaaagagaattgattctgctaaatcagaagatgaagttaataatgctgataaaattaattctggtttaaatgaaaagatgggtgaattaaaagaagtttcaaacttatcagataaaattgaaactacttctaactactcaaatgcagattcagataagaagcaagcttataaagaaactgcagataagattcatgaaactgttgctccatctggcgatgatttaactactgatgatgtaaataatttaattacagatgaagctacaaagagagctgctttaaatggggatgcaagagaaaaagcaagacaagaattagaaaataattacaatagtggtaaatccttgcaagatggtagtactctggatccaaaatactacaatgctagcgaagagaaaaagcaagccttccaaaaagctttggataatgcaaaaaaagctctagataattctgaaactacagaagctgaatataaatctgcaaatgatgaattacaaaaggctaaagcagatttagacggtcaaactactgacaagagcaagttagacgacgcaatcaaagatgcaaacaacgctaaaggtactgataagtacaagaatgcaagtgacgacactaagtctaagtttgatgaagcattgaagaaggcagaagaagttaagaataactctaatgcgactcaaaaagaagtagatgacgcaactaacaatttgaagcaagctcaaaataatttaaacggtcaaactactgacaagagcaagctagacgacgcaatcaaagatgcaaacaacgctaagggtactgataagtacaagaatgcaagtgacgacactaagtctaagtttgatgatgcgttgaagaaggcagaagaagttaagaataactctaatgcgactcaaaaagaagtagatgacgcaactaataacttgacgcaagctcaaaatgatttagacggtcaaactactgacaagagcaagttagacgaagcaatcacagatgcgaataatactaagttaacagacaagtacaataacgcaagcgatgatactaagtctaagtttgatgaagcattgaagaaggctgaaaatgtcaagaacgactctaatgcgactcaaaaggaagtagatgacgcaactaagaacttgaagcaagctcaaaatgatttagatggtcaaactactgataagagcaagttagacgaagcaatcacagatgcgaataatactaagtcaacagataagtacaataacgcgagcgacgatactaagtctaagtttgatgaagcattgaagaaggccgaagaggtcaagaataactctaacgcaacacaaaaagaagtagatgacgcaactaagaacttgaagcaagctcaaaacaatttagatggtcaaactactgacaagagtaagttagacgaagcaatcacagatgcgaataatactaagtcaacagacaagtacaagaatgcaagtgatgacactaaatctaaattcgatgacgcattgaagaaggctgaggaagtcaagaataactctaatgcgactcaaaaagaagtagatgacgcagttaagaatttgaaacaagctcaaaatgatttagacggtcaaactactgataagagtaaattagatgaagcgattaaatcagctgatgatactaagtcaacagataagtacaataacgcgagcgacgatactaagtctaagtttgatgaagcattgaagaaggccgaagaggtcaagaataactctaacgcaacacaaaaagaagtagatgacgcaactaagaacttgaagcaagctcaaaacgatttagacggtcaaactacaaataaagatgctattaacgacgcaatcaaagatgcaaacaacgctaagggtactgacaagtacaataacgcgagtgatgatactaagtctaagttcgatgacgcattgaagaaggctgaagatgttaagaacaattctaacgcgacccaaaaagaagtagatgacgcaactaagaacttgaagcaagcccaaaatgatttagacggccaagatactgataagagcaagttagaagaagcaattaaagatgcaaatgacgcaaagggtactgataagtacaagaacgccagcgatgacactaagtctaagttcgacgacgcattgaagaaggctgaagaggtaaagaacaatcctaatgcgactcaaaaagaagtagacgacgcaactaagaacttgaagaatgcgcagaatgatctagatggtcaaactactgataagagtaagttagaagaagcaattaaatcagctgatgatactaagtcaacagataagtacaagaatgcaagtgacgacacaaagtctaagtttgacgacgcattgaagaaggctgaagatgttaagaacaatcctaatgcgactcaaaaggaagtagacgacgcaactaagaacttgaagcaagcccaaaatgatttagatggtcaaactattgataagagtaagttagaagatgctatcaaagatgcaaatgacgcaaaggatacagacaagtacaagaacgcaagtgacgatactaagtctaagttcgatgatgcattaaagaaggctgaagatgttaagaatgactctaacgcaaaccaaaaagaagtagatgacgcaactaagaacttgaagaatacgctaaacaatttaaaaggtcagcctgccaagaaggctaacctcattgcttctaaagacaatgctaaaattcataagcaaactctattgcctcaaactggtactgaaactaacccactaacagctataggtattggattgatggcattaggcgcaggaatttttgcaaagaaaaaaagaaaagatgatgaagcataatcttaaatagatttcttattattctcaataagaaatctcactaaaaatgaatgcctcataattgttagacataaagtctaatggttatgaggtgttttttatataaaaaataattacctaaatagtttagattatttcagagaaaaaaatttttttagtgtatttatatttgtaagtatttaaatttctctggaggtaattatgtcatacgatgacaaattttatggtttcacaaatgatgaaatttttggcagtattatgcaaaataaacgtttttgtaaggcgattatccaagctgtgctaccagatgtaaatgttgtatcggtagaaagtattgatactcaaaaagagctggggactaaaagtgacaagcaaagtaaatctgttaggcttgatattgcggtcaaagaccaagctggaaacttgtacgacgtggagatgcaagtaaataacaatcatgatattgggccgagaatgagatactatcagtcatcaatggaccgtgacaccttggatagaggagaaccgtatacttcgcttactagaacatatttaattttcttatgtgcatttgatccatttggtagaggtaaattgcgttatagctttcatctctatgatgatgaagataaaagtattcagctaaaaaataatgcggaaaacattattatcaattccaaaggtagtgggagtagcggtgccgatttgttaaatctccaaaagttgatgaatgatgataaaatagaaacaataggagtttttaaagaaattcaaacacaaatacaagagtataatgatgatccaaaaaggagaaatcttatgagaacagcagaattacggatgaaagaagaaactgcagtagcagaaaaacgtggcgttgagaaaggccgagaagaagagcaaagaaaggctataaaaaatacatataaactatttaaaagtttaagccccaattctacagtggatgaagttttacaatggataaaagcaaacacagatgtttctctttcagatgaagaaataaaagctatcttgagtaaaagtaactaattttgcttcaaaaggagaaaccttatgagaacggcagaattgagaatgaaagaagagacagcgatagctagaagagaaaaaaatacggtaaaagtattaactgctacaattcaggatttgagcccaaatattattgaacctggcgaattaatatatttgaatattcaaagtgtaacattttcatctaattcaaaacaaagcatgacttttattatattgagtcatgtttttttgtaaaataaactatatacacaataacatgtcttggaggtgaccattatttctgatcgactaaaaagaaaaatcagccaagtttttattaatgaagtatcaaaaaatggctttagacatacatcagttgccaagattatgaaaatagccgatattcgtagacaaactttttacgacaatttcttagataaatatgacttactttactatgtcgtatcaacaaatttaaaagaaaatattgatgataatatcgattacttaaattgggaagaaattatcatgttgcttttttacgatatagagcttcatgccaaattttatcgtagtgttttaaagtctcaaactgaagttgatatcgtttcaatgattgcattacacttaactactttgctttttcatatccttgaagaaaagggactaagtaacaaccaaaaggctaaggattttgttgaaacttattgtttgggaatgatttatactatgacagctaatttatatcatgaaccagaaatagaatatgatgagcttgcaaaaaaagtggttaatgcaattgaatttacgtttaaaaattattagaagttataatggacaaaattaattttttgtccattatttttgtaagcgctttacgataatattttaagtgtaaagagtaagcacaagaaatcgaggatatgcatatgaaaaagattatcaatgatccaagtaatgttgttccagaaatggttagcggtttagtaagaagttatccgcaaattttaaaacaaattccaggaactgaagctgttattcgagctgataaagaaacaatggctggaaaagtaggtattatttctggtggtggcagtggtcacgaaccaacacatgctggttttgttggtaaaggaatgcttagtgcagcaatatgcgggcaagtatttacttcaccgactccagatcaaatttatgaagctattaaggctgctgaccagggaaaaggtgttttcatggtcgttaaaaattattctggtgatgtgatgaactttgatatggcaaaagatttagctgaaatggatgatatcaaagttaaatcaattgttgttgatgatgatattgctgtagaagacagcttatatactcaaggcaagcgtggagtagcaggaacaatttttatgcataagattcttggagctgcagctcaaaatggtgcaagtcttgatgaaattgaagaattagctaaaaaggttttgccacatattaatacaattgcagttgccttatctgcagcaactgttcctgaagttggtaagccaggttttgaactagctgatgatgaaattgaatatggtgtcggtattcactcagaaccaggatatcgccgtgaaaagattaagccatcaaaagacttatgtaatgaattattgactaaacttgatgagagtttacatcttgatagtaacaaaaaatattccttgttaattaatggtatgggtgcaacaccattaatggaacaatatattttctcaaatgatgtactcaattggcttgaacaaaagaatattaaacctgcttttatgaaggttggtaactacatgacttcaattgatatggcaggtatttcagtaactttgtttgaacttgctgatgataaatggctagactacttgaatatgccagtggaaacagttgcttggtaggaggtaaataattatgcaattaactttagatgtttacgaaaaatggttacgtttatttgctaaaaaagtagagtcaaacaagctttacttaagtgaattggatgctgcaatcggtgacggcgaccacggcaataatatggcccgtggtgtcagtgcagttgaagaaggttttaatttaaagacaccacaagatttgactagtgcattgaagctaactgctatggccttcatttcaaaagttggtggagctagtggaccactttatggaactgcttttttggagatggctaaggctagttcaaagactgatgatcttagtgaattattagaagctgctcttgctggaattaagaagcgtggtggagcaacagctggtgataagaccatggttgatgtttgggaaaaggttttgccaactattaaagatggcagtattagtgaagacggaattgaagaagcagtagaagctactaaagatatgcaagctaaaaagggacgtgcatcttacttaggtgaaagatcaattggtcaccttgatccaggtgcagtttcaagtggttatttatttaatagtttattgaaggcggaagaataatggaatatggaattttaatcgtttctcacgtaccagaaattgcacaaggcttgcccaaactgttaaagcaagtagcaaaagacgtttcaattacttatgctggtggcactgaagataatgaaattggtacaagtattaataagattacagaggcattagatgaaaataaagccgataaaatttgggccttttatgatttgggaagtgctcgcatgaaccttgaaatggcagaagaaatgagcgataagcaaattaccattcatgacactgctctgattgaaagtgcatatgttgccgcttctctgttgcaagttaatacaccaattgatgcaattgaaaagcaacttgcggatttgaaagtgaaaggggactaaaatgaatggtttcttaggcgaatttatgggtaccatgatcttaattattcttgggactggatgtggtgcatcagttaacttaaagaaaaactatggtcatgctagtaattggctctttatcaccattgcatggggaatggcagtttcctttggtgtttatgttgcagctagtttaggatcacaaggacatttaaaccctgcggtaactttagctttagcagcatttagaaagttccctgcagggcaagttgtaccttatttagcaggacaatttttgggagcttttgttggagcagcagttgttgcacttcacttttaccctcaatttaaggcaactaaggctgatgaaggtaattgtgtgggtatctttactaccggtccagcaattaaaaacaatttatttaactttttatcagaaatgattgcaacttttgtatttatcttttgtttgataaatctaggtgattttacccaaggtttgaagccattgattgtcggtttattaattatggttgttggtcaagctcttggtgggacaaccggatttgcccttaatccagcacgtgactttgctcctagattggcttattcaattctgccaattccaaataagggtgccgcaaattggtcatatgcttgggttccaattcttggtccaatatgtggtggactgttagcagtatttttaaaaactttgatatagaaaacaggtgcgtgttgcacctgtttttacttttcaaaagattatgtaaaaactttataagtccattaaaaaataagtaataattatctcaaaaaaataccagtatttttagtgtatctatttattgtgaaaaagcaatttatggaggtaattatgatgtttaatgatgataagtttcatggtttcacaaatgatgaaatttttggtagtacaaaataagcactttcgtaacattctttaaacgtattcaagttaaaataagtgaagtagaaatatattcagttatcaaagattcggttgattctgattttagcctcagtgatacagagattaaagatataatctccaaaaatcttaaataagttttattagcaacaaaaaagcattggtaacttttgttattaccaatgcttttgttttattagttttttaccacataccaagaactttagtccaaagtaggccaccgcctaaccaaattatgttgagaattacaccgataatggcacttaatttccaccaatctttattagcaacatatcctgtgcttgaaagtaatgcagctggaccagcactataagttgaagttgaaagataaagtgagccgcaaaggccgagcattaatgctgcgattaggtgagggactccggctgcaagtgcaactgataagaaaccagcatataaagctgaaatttgagttgcaattgaagggaataagtagtgaacatagaagtaagctaagtatagaattactaaaactgtaatccagttactaccatgtaagatagcccctaaagtctttgagaaccaagggaaaaagcctaacttcatcagtttttgtgacattaacatgaaaatagaaagccaagttaaaatattccaagcaaatccttgactcaataaatctttagcgttaataacgccagtaataagtaaaatagctacagcgataaaactaacttcggttgcactgattccaaacttggatccaactagccacaataagattgcaaatacaaatactgcagccataatcttttctgcaagagtcattttaccaatttcagctaatttaccgtcagcccatgatttagcattaggtgtttctttaacctttggaggataaatcttatataggacaaatggaactaatactaaagaaattaatccaggtacgattgctgcaaggaaccattccatccaggtgatttcaacaccttgtgtcttagctaagccaatcgcaatcatattgccagctaaaccagttagaaacatagttgaagtaacaatgttaacctcgtattcattaaagaccaaaaacgatccaatcttactttgggtgttatcatcagggcttgatcccatagcttttgaaagattatcaataattggatacataattccatttactctcgcattattacttggaatcccaatcgcgagaacagtttcaacagctgataaggcataagcaagacctaaagtctttttaccaaataaattaacgaataaatatgcaattcttttacctaaacctgatttaataaaaccggcggctaagaacatacacatgacaatcatccatgaggtatcattaccaaaaccagcagtaacttctttcatggtgaagattttagttaaggtagcaattgttattgcgattaaagtagataccatcatcggtactggtttagtaatacatgctgcgatagtagcaacaaagattgcaaataaatgccaggctggaatattaatttcagctggtttaaatggcgttaatagccaaatgataataccaagtgctaatggtaaaatccattttttccattgaaatttatctaacatttttcctccaatattatttatcagcttttttaatagcttgatttactgcttctttaagagctcttgtagttgtacttgccccggaaacagcatcaacatcagttgaattattttcaactatcgtttttggaagttctttaattgctctagctccaattccttcggtttcatggctttctagaacttcaacatttttgattttttggtcactataagtaactctaactactatttttcctccaatacctgcttcggttgaacctaagtattggttaggacctaattcgatattttgattcttttcaccatcaactaaatcattaattcttggtaaaggttttgtgatgatgacttcatcagtatcactttttggggttgcagcattttgtccagctaacttaccaaaaatcaaacattcagccaaattaccgcctccttgataacgattaatacaaataccacctaattctccggcaccgtataaatgtggaattggcttgtttgaccaatctacgatttcagcattttcatttcttcttggtccaccttgagtgtttaatatagctggtgctagtttgattgcaaaaagttgtccaggcttaaatgctgtcatattttctggacttcttgaaaattcaatatcatttcctgagttagcaaaatcattaaatttagcaatggtcatttttagcttgtttgcaggaactactaatttttcagctaattcttgaacattgtttgcagagactaatttctttaagaagttagggtatcttaatttaccttctttttctgcagcttcgactttttctttttgaacctcatccattactaaccaagcgttgtcataagcatgcggaatgacataatcgccatgggtataaatgtgaccatgtctaaatttggcatcttctttcataaaacgagttccatcattggcaattgcaaagatggatccagaataaagtaaattccaatgaccgatttggcgaccgcgatgaccttcatcctctgcaaaggtatatccaggaattactcctaaagattcataattagacatatgccataattgtgcgccaactttagcagccataatgacacccgcacctttgttatataaagttccgaaaggagtcaaatgacttatatgaaggaagttttgctggagttgattgttattttcaaatccacctgttgctagtacaacgccatttttagcatggatatagtacaagtgatgatttctttcaatagcaacgccaataattgcacgcttttctgaatcctgaattaaatctttagctttactgttaagccagatatcaatattttcttttcgatctaagaccttttttcggagcaatttccataatgcggcatcaaagtcacgattatgaactaaggcaaaatcaaatgtttttgaaccatcatattcagggtattcagccatatgatcttttttatctaatttatcgcctgacttaacatttcttgaccattgaaaggctttaacatctaaatatttttcaaagtatttaggcatgttaaccataccatgtaagtatgtgtctaaagtcttttcgggaatagtaaatggagcagctagcttatgataatattttgctaatttatcgaaattataggccattgctacatgttgagctgaatatctagtattgccaccttcatgaccgaatggagcagcgtcaaccaagagaacttttgctccattatcagcagcaaatcttgcagctgttgcaccagctccgccaaaacctaaaacgataacatcgtaatctgcatcccattcttttactttcattatctattacactttctattaataaaaaatatttatactagttaatttcaaatgcaaagtaacagtaaagctaatcattgtcaaccataatttgtaatcgcttaatttgttaaatgctaataaatagcagtatatatacaaaagtaaaatagagtgcttttgtaaaaagttagttataaactattaaataaagctaaattattaacaaataaaaattatttatggtgaaagcaatggaaacgaaagattatttatactttataaaattggttgaatgtagaagctatattaaaacagcacaattttttggaataactcagccagcaatttcagcgatggtaaaaagactagaaaaagggattggtacgaaactatttataaaaagggggagtaattctagcctacatattactaatgctggaaaagtggtttatcgagcagctaaagagcttgttcgcatagaaaccgcaatgaaagtagatgctaaaagagcaagcaaaaatcaatttaagctagcatattcagaactggcaggaagtcttttattaccagcgattataactaaacttaatcaaggtaacttgttagcaaatgttgagacatatcaggaaaattcacacttgctagaaggtcatattctggaaggaaaatacgatgccattattttttcacgattaactgatgaatatattaaaggaattaaatcagttgtcctgcaaaagcatgaatatcaattgattgttccagcatcatctgaactagccaaaaaatcagaaattgatttgtttacgattggtactattcctttgattatgcgccataagcggtttttatcacgcacagcacttgatcgaatatttgcaaaaattaattttcaccctcaaaaaaggctgattgtcgatagcattgatgcaacactagaattagttagaaacaatatgggtgttgcatatttgatgaattctactgttaaaaatattccaggtgtggtcgctgttccactggttcctagtcaaaaacaatatgtttatcaatgcctaggtatacgtgaaaatgcaattccaaatgaatttcagaaagcttgcttggaaataattcaagaaataaaatcttaatctaacttattccaggcttcttttactgcttctttcagagctccactggttgcacttgcgccggaaatactgtcaacgtctgctgtattatcttgaagtattgctttagttaatttaggaattgcaagtccaccaacatcaggagattctttttgttgcaaaacctcaattttctcaagcttatttttatttccagttactcgtactacaattggaaagtcgctgataccattgctactaataccaattgcttgattttctttcgtttcataattagttgctgttatttgagcatcggaatgtaattctgggattaatgatgcaccagtaatcgcatcaacagcagaatctaattttctagtacgagcagcattttcaccggcaatttttccagaaattaataagtcagcgatactatttgcacctaaatatttagtggcaaagatatcacctaattcacctgcttcatagagatgaggaataggatttccattcatatcaataacttcacatttttcatttctttgagctccaccatgagtatgcaagatattatgtctaactttaatagcatagtaaggcccatcctcaaatgctcgcatggtattaaggtcgcgatttaagaacatatcacgctttttttcgctgattaagaagttgaaatcttttacagcttgtggcaaaagcggagcatcaattagcttagctagcttttcgatagaatctgccttaatagcataagaaatcaattcttttatttgagcggatttagcagaggtatcattacttaactgttcatattgagcttgatccatgacgatgtgaggatgattttgattaggaatcataatccagttaccgtgattatatttatagccatgacgatcttcttcgtcttccttgaaataacgagttccatcatctccggctacgaagatgcttccattgaataatgatttccaattaatcatatacgcaaatttttctctggaatctccatttctgagagaaagtccatgggaatcataatttgacatatgccataagcgagcattagcttcgatagctaaatcaattccttttcctttgttatataatgtacctattggagctaatgagccttgacctaaataggtttgcaccatatcttgattattttcaaaaccaccacatgaaaggacaactccgtttttagcgcgaatattacggatttggcccttacgtttaatttgaacccctaatgtagtattagtttcagcatcttgaattaaatgaagcgctggagattcataccaaattgttatcatatctaggcgttcgtaaactttttttctaagtaacttccagaagaagccattatacatacctttgttcatgcttctagattgcattgaattagcattctgatattcgggatattctccatttggtcgacgtccagttgcgacagaatcgatatcaaaatactttttagcatattctttcatattggtaatgtttttgacaaagcaatccagtgctcgaacatcatatttaaatgggtagtaggtttgcttataataatcagctaatttttgactgtctagtccccaagcaaaggctccacctgaatatcttgtgttaccaccttcatggccttcaggagcggaatcaattaatagaacgtgcgcgccgttgtcagctgcgaatcgagcagcgccagcaccagcgcccccaaacccaacgacgatgacatcaaattgagcatcccatctagttgagggagtataaatcataagtatcatctctttctaaaacgttttcaaagataatatagaatactatttataaataaacaaaaaatatttaaaagtaaaaaataatgaatatattggccataagtgctgatatataagctataatttgcttattaaagcaaagatttataatataaaaagtttgatttataaaaggaatttataaattatgaatgaaagagacttgatatatttttgtaaattagttgaattagaatcttatacttcagctgccaaggagcttgacgtcacacaaccaacaatttcatcagctgttaggaagttggcgcaacactatcaagatccactaattattcagaaaaataaaaaaagtaaaataacattaacatctgctggtcaaatgctctatgacaagtctaaaaaactattaagtgaaatagctagcttagatcatgatgttcgtcatgctaatgatcgtaaaattagaatttcattttccggtgtagcaggtagtatttatatgccagaaattattgaaaagttttataatgctggaatttcagacatgcttgatccaaagtttgagagatcaactgcagctttttcagatttagaaagaggagatagtgatattgctatctattcttggattgtgccatttaatgatcctaattactttattagaacactggataaaactgaactcgtaattattactggtctaaagcatccttgggctgataaaaatgaaataaaggcacgtgaactaagaaatgaaaaatttattgctagaaaatccacttatttgactagagaatcacttgatcgaataggagaatttggcgattttacacccaatattatttatatagctcaaacaatgcagctgttgattgatttggttgagcgtaatatgggaatcgctttagtgatggaatcaagcataaaacataatgatttagtgcatgtgattcatctgactgctgagcaaaaactttgggcatatatgcaaatagctatgcgaaagagctttatgcctaataagcatcaagctaaaggaattgaaattttgcgtaatttccacagaaaaaagcactaatccctatatattaaggaagagactgcagtagctgaaaaacgaggtattgagaaagggcgagaagaaggagataaaagctatcttgagtaaaagtaactaaataccatcaaaatctcaaataatataaaaaagcctcggaaaatcaaattccgaggctttttttattttaatcattcaaatttactttaatgtccgcaataatttgttcactagttaagtgattatcttgataaatctgcttaagtggcacttggtcagtatattcgcatctttgaccaaagttcaatactttgttagtgccgaggtagctggcaactttttgcccgaagccaccatcaagtgaattatcttctaaagttacaattaactcatgctccttagctaacttatctaagctatccttgtccaaaatgttagctgaaactgggttaatcaaagtagcgtttaatttttctgcaacttcttgacctaaagtgtaaaagtcgcccaaggctaaaattgcgacatccttacctggcttaacttgatacttaatcttatcaaagtcagcactaacttcttcgcccattggaactggtttagttggtatcttgatggcaacggggtgcttacgctggtttattgcccagttgagcattgccttttcttcatttaaggttgttggtgctaagtaaatccaatttggtaagtttcccaccatcacttggtcaaaaattcctaagtgtgtcttggaattacttgaaatgccgccaccagctacgagcatgacaactggaaggtcatttgcggcgacatcatgagaaagttgatcgaaggctctttgtaaaaatgtggaactttcaaataataccggaacagcgccttctttaacagcaccagctgcaaaagcaacagattcttgctcagcgataccaacatcaacgtaattttctggataattttgcttgattttgtctaagccgaagctaccaggaattgcggcgttaattgccaaaactttttcatcgtttttgattcgcttaataacttcatctaaagcaactgaagcagcagttgggccatcaggtgcaggaaccgttgtcttatcagtctttaaatcaaatggtaaaacccagtggtggttggcttcatccttaattgcgggttcataacctttacccttaagagtgttaatatgaagcaaaattggatgatcaacgtctttaaccgcttcaaaagcggcaatcatatcttcaatatcattaccatctgctacatagcgatagtcaaagcccattgcagtaaatggattttctggcgtttgaccatttgaatcgcgcaacttctttaaggcagttacaagaccaccaacattgtcgtcgattgacatttggttatcattaacaacaactactaagttatgtttttcaattgcggcgttgtttagaccttcatatgcaagaccgccagtcatagaaccatcaccaattaaggccatgatattttccttgccgcccatcaagtcacgtgcgcgtgccattccagttgctaaagcaatagaagtagaagtgtggcccacagcatagtagtcatatggactttcatcaggattagaatatggagttacatcttcataatgttctggatcaagccaagctagcgcacgtccagttaacatcttatgtgggtatgtttggtgagaaacgtcccataccatcttatctttaggagcattgaatacataatgataagcaattgtagcttcaacaattcctaaatcaggaccaaggtggccacctagaacagcatctttttcaagaatcaaagttctaatttctgaagcaagttgcttcatttgagctaagtctaactgcttaacatcttgaggaccatggatttgatttaataagaagtctggatgttgattcataagttataatctccttttctaaaagcttacttatttattgtaactttataaaaactgagttcaaatgttttgcatgaatatactttattgaattgtgccttcgaccgtttcaatatcgcccttgctatcacgttcaacaattgctctaattgcggcggttaagcctttaacatcatcttcaagagaaagggcaggtgtctcaggtcgcgcaacaacttgattaggtaaaaatgggatatggataaatccggctttgatgttagggaagaatttctcacgcatatattggacttgataaaaaatgtggttgcagacataagtgccggcagtgttagaaactgctgctggcaaccccgctgctcggatagcacgagtcatagccttaattggcaattgcgtaaagtaggcagttgcaccatcttcatgaatagtagcgtttagaggttgatagccagcattgtccgcaatgcggccatcatctaagttaatagcaattcgctcaggagtaatagcaaagcgtccgcctgcttggccaatatttaaaacataatcaggttggtatttttcaattgcggttttaacaacttcagcactaacattaaatttagttggaatttcaagtttaataatttccgcgccagcaattgagtcaggtaaaagtttaacggcttcaatggctggattaatcttatcattatcaaatggatcaaaacctgtaacaagaatcttcataataactccttcctaaagttaaaaattatcagaatactttaatggtatcttatcagtatttaattctcgcaacaaataaaataatctttggaaaatattttcttgtaaataatttatgtaaaattataaaatgtgtatctatgaagatatattactagttctttaatttatcttttaggttcacttaaagatataccaatttaatgagatatttcttgaccactttgccaaaaaaggctattattgcacttgtaacaataaaaataaactagtccgataaagtaaaattgaactagaccaaaggagaattttctatgtgtggtatcgttggtgttgttggtaaggctgcacgaaatattattttaaatggtttaactaacttggaatatcgtggatatgattctgcaggcatttacttaaatgatttaaagggacatgaatatttaactaaggcagttggccgtatttcaagcttaaaagaaaagttaacccctgatgaagatggattggtaggtattggtcatactcgttgggcaactcatggtaagccaactattgataatgctcaccctcattttgatgaaactaagcgtttttacttagtacacaatggtgttattgaaaactacactgaattaaaagataaatacttacaaggtgttaaattccattcagatactgacactgaagttatcgttcaattaattagcaaaattgcacgtgacaagaacttagatgcttttactgcttttaaagaaactttgaagttagttagaggttcatatgcattcttacttgttgacgatcaagaaccagatcacgtatttattgctaagaataagtcaccaatgatgcttggtttaggcgatggcttcaatattattgcttcagatgccatttcagttttagaccaaactaaaacttttgtaagtcttgaagatggtgatgttggtgacattactaaagattcttacactattgaaacaattgaaggtgaaagagtagaacgtgaacctaaggtgttagatattgaccctaacgctgcatctaagggaacttacgaacactacatgcttaaggaaatcgatgaacaacctggtgtaatgcgtcacatctctcaaacttatcttgatgatgctggtaacacaaaggtaaatccagaaatcgttaatgcaatttctaaggcagaccgcttatacatttttgcagcaggtactagttaccatgcaggtttagtgggtaaggcactttttgaacactacactggcattcctactgaagtgggttatgcttcagaagccggttatcacttcccaatgatgagtaagaacccattctttatcttcttaactcaatctggagaaactgctgactcacgtgttgttttaaaggaaactaacaagcgtggtattccaagcttgaccatgactaacgttgaaggttcaacgttatctcgtgaagctacttacactatgcttttaggtgctggtccagaaatcgcagttgcttcaactaaggcatacactgctcaagttgctgtacaagcagtccttgctaaggctcttggtgaaaagcttggcgttaaagcagctcaagaatggaacttacatcatgacttggcaatcgctgctgaaggaattcaacaacttgttgatggtaaagaaaagcttaaggaaattgctgataagtacttaattaagtcaagaaatgctttctatattggtcgtggaattgatcatgcggttgctcttgaagctgcacttaaattaaaggaagtttcatacattcaaactgaaggcttcgcagcagctgaacttaagcacggaactatttcattaattgaaaatggtacaccagttattgctttaatcaatgatcctgttactgcagaactaactcgtggtaacattcaagaagttgtttctcgtggtgctaacattgtgactatcgtaagtaagaaattcgctaatagtacagatgacattgtattacctgaaattaattactacatgtcagcactattgactgttattcctgctcaacttcttgcttactacgcttctagagataagggcttggatgttgataagccacgtaacttggcaaagagtgttactgttgaataaaatttaatactttatttaataaaaatagaaatacctaatggtatttctatttttttgtttattaatacttataacttaaaaattaatttttataattcttgaaataccgctatttaagtagcaaaaaaataaaatttactccaaaacatttgacaaaataaaagtaattcgatattctataaagatttatatttagcaagcgaggattaaaattatgaacacttaaaattgctactttgtttacaagaaagttctagaaaggaaaagatgatgagaaataatattattttggaatgtcgacaaactagtgaacgtatttatattactagtaaaaataaacgtaatacccctgaaagacttcggttaatgaaatattcacctaagttacaaaaaagagcagaatttgtcgaaattagtaaatagttgaaaggaaaatgaatgaaatcaaaattattattagtaagcttgatggtttcaggagctattttagttggaaccaatcaaaattcgattgtcaaagcagatgatttatcctcaacaacagaagtaaattcaggagtaagttttacaggaatctttcgctatacaaatggtttaccaattgagtccagtagttatgtacaattaaaaaatcaagcaaataacgaaactatttctaaaactgttaatgcttcgggggctgtaacgtttaatgcaacagatggactaaaaactggcactagttatgaagttattgttaataatcaaaagctgaattatactttacaactgagttctagcaactctaatatctcaaaaactttcacagtaaacttgccaggagcagagctgcctttaacttatacagtaaatgctcgttatactaatggtttgccattaagtgaagggactgaaataaaattacgcaatttaactgatggttcaacagaagttttaactaaaaaggtaaacaaccaaggtattgtaacattcacagaagctgatggtttgaaaaaaggtgtcaattatagcgtagaagttcctggtctaacaacgggttattcaattcgttatgacttaggtggaaataagagcaaggacttcatccttgaaactacagaatcaaaagattctaaacaaaaatctgcaagtagctcatcttcaaatcttttatcaagtagtacaaattctacttctctttcaaattcaaataaagccaattctacttcctcagaagatttgaaaaagcagactcttaatgtagcaggaacctcttcacacaaggcaacttcagcaatgaatttaccaactaagaagcaagtccaaaacttgccacaaactggtactaaatctgttctattgcttactgctttaggcttattatcattactcgcttctaaacttctttttaagagaagaattaactaaatctactattatatactccttaatcatttataacttaaaagttccgatttgtttcggagctttttttgttaaaattaaaataaaaataaattcaatacagaaagaaaaatcaatatgaaaattttaatcgcacctgattcttttaaaaactgtatgactgctcagcaagtagctaatgtgatgaagaaggggcttagcagagtctttccagcagctgaatatactcttgtaccgatggctgatggtggagaaggaactgttgatgctttggtgagcgctacaggtggttgctattttcaagttcaagttcataatcccttgaatcaagttgtcatagcaaaatatggctttttaggcgataaggaaacagcggttattgaaatggcggccgcaagtggtattcaatatgtaaataaagaaacaatgaatcctatgaaggcgactacttatggtacaggagaaatgatagtcgatgctgtaaaccatggtgctaagcaaatcattctcggaattggtgggagtgcgactgttgatggcggcagtggaatggcccaggctcttggagttggactgctggataaaaatggccaagcaataaagctaggtggcgaagggttagagcagctagcacatgttaatcttagtcaggttcctgaacaaattaaaaagaccaaaatttatattgctagtgatgtaactaatccgctaacagggccgcaaggttcaacagctgtctttggcccacaaaaaggggcaactgaagcaatgatcccaatccttgatcaaaatctgcaccatcttgcccaagttgtcaaaaaagacctcgagcttgattatgaagcggttcctggtagtggcgcagctggtggattaggttttggtctattagcttttactaattctaaaatggaaaaaggaattgacttagtaacgcattttgctcgactagctgaaaaagcaaagggtgcagatttggtaatcactggagaagggagtactgattttcaaaccaagttcggcaaaacgccatatggtgttgctctaacaaccaaaaaagtagctccacaggctccagttattgttttatcagggaatattgggccaggggtgaagagcttatatgaaaataaggtaatcgatgcaatcttctcaactccgagtggtgccaagagccttgaacaagccattaaagatgcgccgaaagacattgcactagctgctgaagaggttggccgattaattagaagtgtcattaaataacatgacttcataaaacgttatcattttttgactgttaaaaaacttcttgttatttattaagcaaataaattgtttttatcgattttttggactattctaaaaacagagtaaagctctataatttattgcagaaggaaaggaattaatatgaagaaattagaaagtactaaattaacagcagaacaacaaagattctttaatgtaaagcttgcattcgtatcatcagtaagtaaagatggtatgccacaagttggtcctaaggaatcattacgtgtagttgatgacagtcacttagcatgggttgaagtaacgcacgcacacttatgggacaacatcaagaatggtagtaaagttgctgttgtagttggtgatgtacttagccacactaacgtacgtgtaattggtactgcacatgtttcagaagatcaagctttaattgaagacttacgtactaagactggtaaaaacggtgatgttattgtagttgacatcgaagaaattgatgcttaattaaaattcatagaaaaagaagtagccagttgttggctacttcttttttggaaataatgcaagttaaataacattttttacaaatgttgataaataagcaaaaattgtgttattttataggaaaatctattgaatatgcttatgtgttttgcttaaataataaacagaataattgttattaactgctgctatgggggcaacacacaattaaataggggggagattagttaattcattagggagaaatgaattaattaatctatatataaaataaaagaagcaccggttaggtgcttcttttattttataatgctgattaatttttttacttcggtagcgattaattgactaattctgatgagacttagagtcatcaaagacagttgttgtagttgtttcaacgtatttagccatacgagcagacttatacacatcaaccccatccttattaaatgcatgtgcatcagtgatggtcttcatcgcttgacgcacggttgcttcatcaaggccatctttagcatttggcactgataaagtggtgtttttgtcttcactattaataaaaactaactttaaaacttttgacatgatattggctccttactatgtaaataattagactaacttgatgttttgcttttggattaagatggcatcagataatgtatcgccttgtaaactgctgagagcttggcctacttgagctagagtgttagcagaggcatctttagcaacgtttttcatagtgcgagttaatttaccgtttgtgtaactttctgaagcaaaagtgtattggactgattgttctagtaattcaaaattcatagttatactccttataaataagttatgtaagtcatgcgcgcaattgccttacactatatataacgaatgggagaagcaaaacacgccaaattttttgaatttttttgcgatgatgagggggaagttgggtaagtagtagctttattaaggtaactttcttgtataatataaactatagtttaattacaacgaaagtaggttattcatgatttacgataaagaggatgtatttgaaaactccttaattgaatacttatcaactgggaaagttcctcagtatgaaattaatgaaccaggccaaaattatgttattgatagtttgcgaaagcaaggtagaaagcaaatttggcaatatttgtcagatgtaaaaactacccctgcactttggcaaaactttaaaaagattttggagcaacacaatcaagataaacttgatggcccattatcagaaaatgaatttgctcaagttaagaaagaaatttcagctttgaagacaccttatcaagctggacaatttttatatggagtaaatggcattagtcaaattgaaattgacttagatgatggacgccatgtctttttaaaggtctttgatcaaaagcaagttggtgcaggagatacggtttatcaagtagtaaatcaaattcaaagaccagcggtaattcatggcaaacaagaacgtagatttgataccacacttcttattaatggtttaccaatcattcaaattgaagaaaagaaagatggtatttcagcaaatgaagccctaaatcaaatgcatcaatacattgaagaaggacaatatagtgatattttctcaactgttcaaattttagtggcaatgtcaccccatgaatgcttgtacatggcaaatactacagctgataaatttaataaagactttgcctttcactggcaacgtaaaaaagataatacacaagttaataattggcttgaatttgcagatactgttttgagtattccgatggcgcaccaaatggcaactagttatatgattttggatggtacgcctaataatcagatgcttaaagttatgcgaccataccaggtatatgcgacacaagcagttattgaaaagcttaagcactgggactttgaatatggtgaaaaccgagttggttatgtatggcatacaactggttcaggtaagacaattactagtttcaagacagcctggcttgctagtcgcttgcctaacgttgataaagttgtcttcttagtcgatcgaattgccttaactagacaaacaatggaaaaatatcatgcttatgatccagaagctagtgaagatgattggggtaatgtgcttgatacacgtaatactacggacttgaagaataagttacgtaaacgtggtagtgacattattgttacaagtgtgcaaaaacttgaaacattggttaagcgcgacagctttaaagatccagataaaaatattgtctttattgtcgatgaagctcaccgttcaactggtggggatgcatttagtctgttaaagaaggcctttaaaaaaggagcttgggttggatatactggtacaccaatgtttgatgatacaacagcaaatggtgtaagaactaaagatgtttttggtgaaccacttcatatctatactattagagaagctattagtgatggtaatgttttacgttttaaggtcgacttccaaacgactattgacgaagacaagatgaagagtgactacttgcctgagttttaccaccaaagatatcccaaatggactgaagcagatatcaaacataaaattgaaaacttgcagcctgatgatattgatgatgcaattgggccaactttttatgatgaaaataaagagcacgttaagttagttgtcgaagatatttttaagaactggcgtaatcgctcaaatgacggtcagtataatgcattattgacaacacacgttggtggtaatcgtgcaagtactccaatggctatgatgtattatgatgaattccaaagagttaatgctgaacatcaaaaaaacggtggccttgttctaaaagttgctgttactttctcacaaagtactggtaatgatgataatatggttgaaaataataagaacctaagtagagctgtggatatttataatgcgcaatttggtacatcgtttggaatggacgatattgcaggatatactgctgatgttgtttcaagattaaataaaacagcttttgataagaactacttagatttagttattgttgtcgaccaattattgactggatttgatgcgccaggacttaataccttatatgttgatcgaatcttgagaaatgctagcttgattcaggcatattcaagaaccaaccgaattgcagatatgcagactaagccgtttgggagaatagttaactatcgttggccagttgaaaacgagaagttgatgaacaaggcattgtcaatttatgcaaataagtcttcgacctttggtcaagaagatttgctagataaagagccagaagataatcctgttactgtaccatcatttaatgaacaattagataatgtaaaaaagacagtagatagaataaaagagttaactaatcagacattggaagaagtacctaaatcagaagaagatcaggatgaactttataaacttctaagaaaatataacaaagaggtagaagttttaaagcaatatgatcttggtacagatgatgaaggaaatgaaatagggtacgattacgatcatccagaaaagttattacaaaaaatggatataagtgaaaatgatgaaaagatgattactactgtcttaccaaatttgattaagaaagaattacatgaccgtaatagagaaatgcctgatatcgatttacgcatgactcatattaaggaagtcgtaattaattatgattatcttactcacttaattgaagaacttattaataaggttcatgaaggtgatgaagaaggtattcgtaaagctcaggataagattagagaattcactttatcaatggataatcgagcttatgccaagcaaattgaacggactagtagggctattgttaataagcaatatcctagggatgctgaaagtcaaaagtggccatatcacgtgaaagatgttcatgaagtaatttctcaagctaatgaagctggaattgatgatattatttatcaattcagaattaagtggggaattactgatgtaataaatactgatgaacttaagtcgatatttgctaaccatcgtcttgggaaaaaggacttaaacgattctgggaaaattgatgcaattaaaaaagatgctgctgaaatctataaaaaacgggcaacagatgaaaaagtggttaaattatcaaagataaaataccgtaattcactttctgatgctatttatgaattggcagatgaacttaagagagaaaattagaagtagggaagagaataaatgtcagaaaaagatattacaacaaaattatgggccatggctaatgaacttagaggaaatatggatgcctcagaatataaaaactatattttggctttcatgttttatcgctacttatctgaacaccaagaagactatttaaagaaaaacgatattttagatatcgaagatggtgaaagtattaatgatgcttatgttcgtgaagctagtggggacgatttagcggattatttagaagatattgcatcaagtttaggttatgcaattgaacctcatgatacttgggcttcattaattaaacgtgttcaagataaagaagtaattccaagtgattatcaagatttacttgatcacttcgctaagaacactgaattagctaacaataagactgctagtcaagacttccgtggcgtcttcaatgatgttaacttgggagattctcgtcttggtagcaatactaatgaccgtgccaagtcaattagtaagatcgttcaattagtagatacaattgaatataaagacgaaaatggtaaagatattcttggtactatctatgaatatttgattggtcaattcgctgctagtgcaggtaaaaagggtggggaattctatactccatttgaagtttcaaaggttctagctaagttagtaactgctaatttgaaaggcgaaccagaagaattcgaagtatatgaccctacttgtggttcaggctcattattacttactgttcaaggcgaagttcctggtggtaagaagccaggtgttgttaagttctatggtcaagaaaagaacactactacatacaacttgtcacgaatgaacttgatgatgcatggcgttgaattcactaatattcacttgtctaatgctgatacgcttgaagctgactggccagatggacttgatgcacaaggcattgaccgtcctaagactaacttcgatgcagttgttgcaaacccaccatattcagctcactgggacaataatgaaaataagttaaaggaccctcgtttttcagcatatggtaagttagcacctaagactaaggcagactatgctttcgttcttcacggtttgtatcacttatcaccagaaggaacaatggcaattgttcttctacacggtgtattgttccgtggtgcagctgaaggagtaatccgtcaaaacatcattgaaaagaactaccttgatgcggtaattggcttgccagctaacttgttctatggtgtaagtattcctactattgtgcttgtctttaagaagaatcgtcaaaataaagatatcttctttattgatgctagtcgtgaatttgaaaagggtaagaaccaaaacaaattaactgaagaaaatattgataagattatctcaacttaccttaagcgtgaagatgtagataagtatgctcacaaggcagaacttgatgaaattaaggaaaatgattacaacttaaacattccacgttatgtagatacatttgaaccagaaccaccagttgaccttggaaaagttgctgatgaacttgaagaagttaaccaaaagattgccgaaaataaaaaagaactgttaggaatgttaaaagaattaacaacagatgatgacgatttacgggcacaattggacaagtttattagcgtatttgagaagaactaagagaaaagtggggtgaaaaataatgacagacgatttgatgaaaagcagtggtagcggggatgctggcaatagcactcacgctgatgaacaacgattgtatccaaaggtcagatttcgtggttttgatgagccttggaagaaggttaagttgggggaaattgcaacaacatattccggtggtacaccaaaagccggaaataaaaaatattataatggtttaattccgtttattagatctggagaaatacatagtaataaaactgaattgtttatcagtgaagctgggcttaaaaattcttcggcaaaaatggtaacaaaaggagatttgctttatgctttatacggtgcaacaagtggtgaagtagacattagcaaaataaatggtgctattaatcaagctgttttagcaataatacctaaacaatataatccatatataatttctctccttctttctaaaaagaaagatgcaattttaagtaaatacttgcaaggtggacaggggaatttgtctgccgaaattgtaaaaagtataaaattaatccttccctcaaaaaatgaagaaagttcattgtatccactttttaaagtccttgataatcttctttctcttcaacaacgaaaattagagttggaaaataagctcaaaaagcagattgctttttatttatattcttttacattaacgccaaactttaaacatattgaagttaaaaataaaaaattaggtgatatagttgatatttcaaatggaattatgggagattctcaaaagaaaagtggtaattttaaacttacaagaattgaaactatatcaaacggcaaaattgatttatcaagaacaggttatatagatcaagtaagtgatgagaaaaaatttctagaagttggagatatactgtatagcaatatcaattcgctaactcatattggaaaaaatgctattgttaaagaaaagcatctaccacttgtacatggcattaatttatttagacttcacataacaaataatcaaattactcctaattatcttcatggtttattaaatcttccaaaatataaatggtgggtaaagtcacatgctaatcctgctgtaaatcaagctagtataaataagacagaactgagttcattagttataaaatatcccgatttagatattcaaaaccaaattaacaatataaattattcggttgctcaatattgggatatacaatattcaaagaaagaaagtttatgtcaactcaaacaattcttacttcaaaacttatttatatagcacaaagtcctagctatccaagctaggacttttattttatagctgagataaatgatgcattactttatcattatctttattttcaagctcttgaataatgtgcaggtatgtcttttgagtagtagtaatattagcatgacctagtcgtttagctacactcgctacagatacaccttcatagagaagcagtgaagcatgtgtgtgcctcaacccatggattgaaataactgggatttcagcttgataacatagtcgctccaagattatgtttatcgttgaattaaaagcccttcctgatacaaaaataggcttgtcagggtccataccttgtgtaatctgcttaaattgctgagcaagttgccaatcaatcattacattacgcttagaagtcggattcttagttggtctgaatcctccgccagcatatttgtaattccaggttttggttacagtaataacttgcttttcataattaaagtcattaggagttaatgctaaagcttcagcataacgcaagcctgtcttagcgactaataaaataaaccaatcccaattaggttctgtacctagctttaactgttttaaaagcatctgtaattcaaataaattgagatactttttcttttttggttttggttttcggcctttaataattactctccgagtgggatcagtttttatcattccatcatctagtgcgtctataattgcagctttaaggtggtgatgaaagtctaaggttgtgtgcttttcgtgggtttcagcatagtcattcaataacttttgatatgtctgacgatttaactcagataatctcaattcaggtgctaactctcgtagtttgcgctcggtcagataatacttatcaagcgtaacttgccgaattgcaccttttttatacagttcaatccaattaccataataccgataaaacaactttgtactaattttctttgacataagaaaacctcctaaattttgattaggaggttattgtagcaatctagataaagagattttgaagtaggaattgtttgagttgattagtagtaacaataactttatattgtatatcaatatctgtatcaatattacaaaacaatttattaagtcctttaagtgctttataagtcggaaatactatgtgaaaatttcttattttctttgcatttaaattattttgagttccagttgaaatcaagcgaatccattctttatcaaaattagctttttcaagaataatatatataaaatctctcttttcatcatcatcaaaagtcatgttaaaaaaagcctgacttgttgccatttctttactcaatattcctatttttcctacacttgcatacattgctaaactaattgaacctgcaggtacaagcttagcactactattttctaatccttttttagataatgttttttgagttttataaattttcttattatttaaatctgaaatagttaggaaaggtatattcccaccataaaaagttttatttttaacagaaggtgtccctccagagcaatcagtattatatatttcagataattttgcatatttccatttatcttgaaattctcgaaatctaattttaggcttaaagattacagcttcttttgaggggattgcattttgaaaaaggaaaaattttaactgtttttccaactctaattttcgttgttgaagagaaagaagagagttcattaatttaattaattttccaatttgtttttgttcacttatttttgggaaacatattgtttcatttaaaacagcttttttagaaatattatatctagaaattccttgagcaagaatgtacatttttcttctaaaatttggtgaacgaaagttataactattaaataaattatcaaacatacttatttctttaagtcgatatccaaaagaaaaactatttaagtagcattcattaaggttagtatccaaaacgcttgataagcctacttcttgaggagtctctgatgaaatagtaaaaaagatatcaccttttttaactaagtgttgtttattatcaatttctattttatcagtaagtttagtgtctattattggattattaagtatatttaaataagtaatatatttagcttctccatgaccaaaatcagaacttttttttccagacaaacctgaaaaagattcacctatatttttcaatttttctgttctccaagactcatcaaaaccacgaaatctgaccttcggatacaatcgttgttcatcagattattcactggcaacaaagagtgatatttttgcttcaactcaactaaaaatggagaatagagcactaccaaaaggtttgatttttaccattagatttcatataattataaaagaaaagagggcaacggagtcccagtccgttaccctcaaacgtagttgaataactagagcttgagctaatctttgcgattagctttttttattatcgcatatgcgattgcacaggaaattaaaaattttccaagtgcaattatgacattagccataatatataagctccagtctattccgaataaacatacaagcacttccaagttgaataaatgaaatgtgaggggatgtagttattcttcactacgagctcgtcttcttgatgagcttttttatgtacttaatcataaatttaataaattctttattaattagcacatatatgtgttgaattgttataatttatctatcaatacaatgaaattaataaaaagcactgagcatatttattttaaaataatatatatcgtgttattatagtgactgaggaaagtgtcctttcctcaatatacgctccctagcatatattattcctacaaatatatattcccacgattgtttgaaaagacacgtcaaaacttcaattggcgtgccttttctcatctaatcatgctataatcttaattacgggtaaacaaacacccaaacaataatccggggctaatgagccaaaaaagcatgattcttagaattatgcttttttgattctaactagtatattttgatatataatgagtgagagagtagtgaaactactctctacttcattgttttctctaatcgagaaagcaaatatctcgttttaatttaattatcttacagggtagctatctataagttatagatagctgcttttttatgataaaatatcagtattaggagggtataagggattatatggaccgcactaatctgaagaattatctaaaagataattatgaaaatgaccaagatttcgctaaggactttgttcaatgtagccttaacgttaatactggtatcgcaattattaacttacgcaagaagatggggcttactcgtgaagaattcgctcgatatgttaatatgccacaagcaactattttacagattgaacaaggtgatgttgatgtgacaactgacttgcttgtgaagctagctacggcatctaagcaacatattgagattaattttagtccaatttttgacgaataattagcaattaatataatcataggcaattacatactatcgatgtaattgctttttttgttagaaagggcttaactgcttgatagccaaggaagatgcgtgatttataggtgattaagttattacaatttaagcgtaatttgataccgcttttttctaattcgggtgtaatttttatcccgaaaattcaattactatattaataatgtctagcaaaaaatacgttctttagcaattcttaataatatattgcttgtaaattaatgaaaaagccgatattattagcaaatatatttatttaagtatcataaatattcaatttttaatttattaggaggatttatggccacaaaacgccaagctaatttaccaactgctaccgaatttcaagtttgggataaagaaaagataagaaagtacatccccaatcatcaagccttaaaagaatacattacgattgactctacttataaaataaaaccgtcaatgattgtcttatttgatttcagttcagaaccaattattggcaaatataagtcggtgatttttgacacggaagctggcattatcttaacgaccaagaattctcgtcagctctttaattctttatcccaaagcagtacccttggcttaaaataccagaataaacttcgtcagcaattaggtcttaagagaaagcacgtttttgcccttggaaattatgcttatttttctctaaatggctttagtcaattgaatactagttggttagctcttcatcagctgtctgactttattcaattggcagaaacagaagcccaagcctctacaatcaagctaaattctactcaatacttatttaagttcacttcctgtgcaccccacattcaaaagcgcctgcatgaatcaatcaccttgaaccaagaattaaaagagaccgccatcaattttcaaaatgaacttggtctcaatcaaacactaaatgatagcttacttactgaagaagaacggctttttaagttacaattagctaccaagccgacacttgcatccctgattaagcaagttcacaatgatgattttgaacagtatagtttctttatgaagagtcagactggcacaatctggactaaaaacgatcatcaaacgtgcctaagctttactagacgcaataacttaatgttttaacttagcctgctgctagctcaatcaagcttagttcctcctttagcttggttagaagctagctttatttttaaatattattaacttcgcaagcttgcaaataaccgcaagaaggaagttaattatgaaaaaagaaaatatctcaccacaaagtttgttaacggcttgggaaaataaaaatcttgttacccgagttctaaagaaagcccatgtttatcgtagttatagtgaatatgaagacttatttcacgaaggtttaattacctatgcacggctgcttgaccgctttaaagaaaaaagtctaactgaaattaataagctagcatataagaagatcttctggaagattaatgatgaattacgtaaagaacaaagaagggctgaacttttcctcccaattgaaaatcaagattttgaactagaagaagaacttagtagggaagactggctagttttagctaatgaacttggtcagcttaccgaaattgaaatggtaatttttagagagcattttattgaaaaatgcgccttaaagactttagctagtaactataactttagtctgcgcactctctcaagaaaaaaacgtgagttaattattcgtatgaaggccaaactcaaaagatgctagtaatatagtacgttttattattaatttgttggcttaaatgatatgatacctttaagaagtaaaagttcgtaatttccgcgtctttataactatgtaagggtttacagatgcaagaagacatgataaactaaagtcataggataattataaagtggattgttactttaattaggcaagaccacaaacacgagttacaactgtactcgttgtttgtggtcttttttgttggaggaattagctatgacattccggctagtgcaagtattgaataataatgtgggattagcttcgaaggaagataactcacaagtagtaattatgggaaagggcctgactttccaaaagaagaagggagatactattaaggctagtgcagttcagaaagtttttaaattacatgaagaaaatccatcagatttaacatccttgttatcaacaatccctttggactttcttacagtaagttacagcttgatagatgaagcgcaagaaaaatatgattattcagttgaaccatatatttatacaaccctaacaactcacctttatgaatcagccaagaggttaaccaacggtaagttaattgaaacatacttgcctgatttagaaaaagattatcctttaccctatgaaattgcaggttatgtattagatggttttgctacaagacttaatatcaacttccctaaacaggaacaaaaaagtgttgccttgcattttttgaatgcaagaactgatattcatacacagaaccaggtacaaagaaaggcagttaataagaataaacaaatacttgcgattgtcgagaatgaattgaataatcatcaaatttatcgaaatcgagataatgccaatgattatgaacgattattagtgcatttgaagtattttatcaatcggattaatcaaaagcctgtacccaaagttttatctgagacaattattaaggagattataaaagattaccctcaaacttttgcaatcgtccaaaagataaatgagcagataaaacaaaagatgggcttagaatttacgaatgatgaacaagtctacttgacaatacatattcaaaggctgattagagaggaggagaaagatgacaaacataatgaaaaatagtgaggatgtcaacacaatcggtttctcaattgtggcttatgccggagatgcccgaagtgacttagttgattcgctaaaatgtgccaaagatgggaagtttgaagaagcacatcgcttagttgtagaagctgagaagtcaattaacttagctcataatattcagactaagatgttgacaaaagaagccagtggtgaaaacttgacactttcgtttattatggcacatggacaagataccttgatgactacaatgctcttaaaagatcaaatggacacaatccttgacttatatgaaagggtgtttgtattagagaaaaaactagaagtggagtgagctgaatggcgcaagtcaaaaaactacctaaggggtttcttttaggaggagcaactgcagcttatcaagttgaaggggctactaaagaagacggtcgtggtcagaatatgtgggatgtctatttggctaaacaaggcaaatattcccccgatcccgcatctgatttttaccatcattaccctgaagatattgccctagcaaaaaagttcggcttaaatgcaattcgcctatcgatttcttgggttaggttgtttcctaagattgatgggccggctaatgagaaggcagtagcttattatcatgatttgtttaaaacgtgtcttgataacggaataacaccttttgtagccttgcatcattttgactctccacaagaaatgcttgaagaaggagattggcttaatcgaaaaaatattgaccgatttattaagtatgcgaaattctgctttctaatttttcctgaaataaaaaattggtttacgattaacgaattaatttctttagctagtggacagtatttgggtgggcaatttccaccaaatcatcatttcaatgtatctgaggcaatccaagctgaacataatatgctagtggcacacgctcgagctgtaattgcttatcatgatttgcatctgccaggaagaattgggtgtatccatgccttgaagacaggatacccaaattctagtcgactcgaagatattcaggcctgccaaagatatgatgcttacaataatcgcttcttgcttgatggaacactacttggtgaatatcaacctgaaactatggatttactgcaagaagtattagcagccaataatgcaagtttgacaattttaccagaagatttagcaattttgaaaaaagctgcaccccttaatgggatgtttggtatgaattactatcgcagtgaatttatcagagaatatcatggtgaaagtattgatcaatttaattcaacgggggaaaagggcacaagtgcttttaagtttaagggagtaggcgagtttgtcaaacgaacagaagtgccaactactgattgggattggaatatttatccgcgcggcttgtttgatatgttaatgcgaattaagcgtgattatccgaatgcaccaactatttatctcacagaaaatggcatggcgctaaaagagcagctaaatgaagattatactgttgacgatagtcgcagaattgactttattgatcaacatttagagcaagtcttaaaagcgcgaaaagcgggagtaaatattcaaggctattttgtttggtcactgcaagatcaattctcttgggccaatggctataacaagagatacggattattttatgtggattttaagacacaaaaacgatacccaaagaaaagcgcttattggtttaagcaattagcggcttcgattgaggagtaaggatgtgggtttatcatgaataaaatagtaaagtggatccagaagcaccaagacgtctttctaaaaatatctaaaaacaattatttaatggcaataaaagatggttttatttcgatcatgccattggtaatgttttccagtttaatgattttgattgttcaattaccaactctctttggaattgtaataccggctaatgccaaacttattatggtaaaaatttacaatttaacaatgggaattatggggctaatggtcgctggcacgacagcgaaagccctaactggtaacttcaatcggactatgccagaaggaaaggtaatcaattctacctcaacaatgattgctgcaatgtctgcctttcttttcttagcagttagcccagatcctaaaactggctcccttgatgtcggctttttaggaacgcaaggcttattgagtgcctttgtagctgcctttttgacagtaaatatttacagattttgtattaagaaaaatattacgattagactaccaaaagaagctcctgggaccattgcccaaagcttcaaggatattttcccatttgcgttttcagttttatcctgcgttttaattgatttaattagtagagcagcagtgggagctccatttgcatcagtatttcaaaagactttaaccccactcttaaaaggggtagaaacttatccagggatgtgtttaatctatggattgagtgcactcttctggtttgtaggaattcatggcccatcaattgtaatgccagctgtaactgccttccaattggctaacactgaagctaatttaaagctttttgaagcgggccaacatcccttgcatgcaatgactaacaactttggtaactatattgctgcaattggtgggactggtgctacttttatcgtacctttggttttgattctctttatgaagtcaaaacaattaaaaactgtagggaaggcctcatttattccagttttgttcgctgttaatgagcctttgctgtttgctgcaccactagttttaaacccatatatgtttgttccgtttatcttaacacctatttctaatgtaattttaggtaagttctttatcgatgtgttggggatgaatggcatgatttataccttgccttggacggttcctgggccaattggagtactactaaacactcatttccaacttatctccatcatcttcgtaattattatgttagtgatggatgcagctatttactatccatttttacgagtatatgatgctgaactagttaagcaagaacaaagtaaagtacaaaagctagctgaagaagagaactttgaaagcacagtaaaggaagaactttccgaaaaagaaataacagaaaatcaagagcaagaacaaaaagaaacaaatcatccaaacttgacaaaagagctaaaagtcttagttttatgtgctggctctggcactagtgcacaattagctcgtgctttaaatgaaggagcaaaagaagaaaaaatgcctattatcgcaaattcaggtgcttatggtgcccattatgaaatcatggcaaattacgatgtggttattttagccccacaggtacgttctttttactccgatatgaaagcggatacagataaattaggtattaaactacttgcaactaagggggccgagtacattgaaatgactcgtaacccaaagcaagctgtaaaatttttgcttagtcaactggatctaagttagtggttttaatcttaggaggaaactaccatgcataaatttatggattttttgcaaaataaattagctccttttggagaaaaagttagtaaacaacgtcatttaaaggcgctgcgtgaaggtttcatgctggcaatgccattagttttaattggttcgcttttccaagttattgcaagcttcccattagaaagttttactaaatggcttcatcaaacaggcttagaccttattttcaataacttaattagtaacagttttggcttgattgccttgctaacatgttttggtgtggcttatcgtttagctacttcatacaaggtagatggcttatctgcaggtgcattggcagttgcaagtatgttgctagcgacaccatcaatcactgataaagctggtgtagcaggtattccatatccaggaattggtggacgtggtttattcacggcaattatcgttggtttagttacagctgaaattttccgttggttcattcaaaaagacattactattaaaatgcctgatagcgtaccagaagttgtaggtaaatcatttatggctttagtaccaggtgctgttatcttaacattctttgaagcaatcacttggggaatttccttaactccaattggtaatttaaacaacttactaggaattgtaattggtacacctttaggtttaattggtggaactttaattggtacatttattgctattttacttaactcattattctggttctgtggtgttaacggtggtcaagtagttaatacagttatgcaaccagtttggttacaagcagcaactgcaaacttagctgcttggcaagcaggaaaggctttaccaaatattattacccttccatttattgacttattcgtttatatcggtggtggtggtgctacaatcggtttagcactttgcttaatgttcttgagtaagagtaaagaatacaaggtattaggtaaagcagctggtatcccagccttctttaacattaacactgctatcttgttcagtttcccaactgtattaaacccaattatgttaattccattcttattagccccagtaacgaatgcagttattacttactttgcaatggctttacatttagttcctttaactactggtgctatcatgccttggactatgccaccaatcatcggcggattcttcgcttgtggtggtagttgggcagccgcaattttacaactagtgttagttattgtttcattctttatttactacccattctttaaagcagctgatgccgctcgtttaaaggccgaaatggaaaaatcagataatagaagatagagtaggagttcattatgaccattttaattaaaaatactgccagcaatcctacagtagattatgctgcaagtgaacttgcatattacttagaaaagatgactaaagcagaagttggctttagtacagacgaagctgatattgtattaaagttagtagctgatgatgaagaaaatgatcatgcccaatatcagttacaagacaatcaagttattattgctggtaatcgaccagtagcagtattaattgctagttatcaatatttacatgctttaggtgctagatttttaagaccaggtagagagaatgaattaattcctaatattgaagtagaagaaattaagcaaataaaagcatacgatcatgtggcaagttacaagcatcgtggagtatgtattgaaggagccaattcattagaaaatatcttggaatttattgaatggcttccaaaaaatggctttaacagcttctttattcaattcgctaatccgtatactttcttaaagcgttggtatagccatgaattcaatcattatttagaaggacgcgatttaagtgatgcggaaattcaaacgatgagtgatgaaattgatgaagctatggctttacgagatttgcgtcatcaccgtgttggacacggttggactggtgaagtacttggctattcatcagagtttggctgggagagtggagttgaattagcagaagacaagcgtgacttagttgctaaagttaatggtaagcgtgacttaattcaagggacaccaatttttactaacttagatatgagcaatcataaagttaatgaagaaatggctaaagtaattgttgattatgcagcaaaacataaagaagtggattacttacatgtttggctatcagatggtgataataatgtgtgtgaatgcgatgaatgtcagaagattttaccagctgatcaatacgtcaactttctaaattatcttgatgaaaagctgacagaagctggcttagacaccaagatttgcttcttactttaccatgaactactctttgcaccagaggaaagcaagattaagaatccggaacgtttcgttttaatgtttgcgcctattagtagaacttttgaaaagagttatgctgatgttgattatgaacatggtattcctgaaccaacaccttatgtaagaaacaaaacaactttgccaaactcacttgaagaaaacttagcatttctatttgattggcaaaagaactttaagggcgacagttttgtctatgattatccacttggtagggcacattatggtgatttaggctatatggaaattagtcaaatcattagtcgagatattcgttaccttgataagttacatttaaatggctacattagctgtcaggaattaagaactggttttccaactactttaccaaattatgtaatgggtcgcactctttgggacaagagcttaacatatgaagaattagaaaaggaatacttcacagcagccttcggtaaggagggcatgactgtggcagcatatcttgaaaagctatctaatttatcaagcagtgactacttcaacaagattggtagtcgaattaatgctcagctagctgctcaataccagggatgtgtaagtgaagcggttgcgattttgctagtagtgattaagggcttgaaggatagccaagctagtcaacatgaaaattggcgagttcttgcatatcaccgtcaagcagtaattaaattagctactgcattaggtcttcaagcaagtggcaagcaagccaaagcagaagaggcttggattgatttccaagatttcattaagttgcatgaagcaaattttgaaccatatttagatgtctatcgaattattgaagttgcaactaattatgcaggatttaaatatcgggaataagtagaataaattagtatcacaagttcaacttactgatgtaggttgaacttgttttgtcatcaagtcaaaaatattgataacaaaaattagtgctgatataatataagtgtaaaagttaggtaagctcggccttataagtgagcgtcataaaagtcaggtgagctcggccttataagtgagcgttataaaagtcaggtgagctcggccttataagtgagcgttataaaagtttggagtaccaactggtactctttttttatggagtgttcaatgaaaaaagagaagctatatttatacaatatcagctctaaatatgtagctgaactgcataagcttgataaacatgttttttatcatcatggattacatgatcgtccatatgttggtattcttataaagcttgataattttaactattttgcacctttaggttctccaaaaaagaagcataaaaagataaatgaaaatataacattttctaagattaattataggaatcaattcttaggggtaatcaattttaataatatgattccagctcctaaaagtatgttccaaaaaataaatattcaaaaaatagaagattctaaatacagcaacttactttcaagtcaattaagagcgattcaaaagcattcaaataagtataagcataaggcaaatatacttcgtatgaaggttaaaaagcatgaacttgagagtaaacaattagaaatatgcaatgatttcgaaaccttagaaaggcatatttatatagttgaagaaaaacttctaaaattcactacggttaataaaaataattagcaccacaagttcaacttactgatgtaggttgaacttgttttgttttataaaaatcataccttaccttatactattagcaagcattttgctataattaaaactgtttggtaatggaggtcttttaatgaagaaacatttatttttcctcggtaaagcaggaacaatttattacagttggctaatggttttgctctttattagcttgattatcgccttagaagggaataaggcgataatgtggccggcagtaataataggaagtatatttttagtaatcgctatctatacctttttatgttcctatattaaagaagaaaaaaattctttattactaaagttaccatataaaaagaaagtagttttaacacaaaagccacagaaagttgctagttggcatgcttttcatatttatcatgtagaactatctaaatatgaagctgttaactacatgattatccaaaagaaagggtagtggtccaatgaaatcagatatagaaattgcacaagcaagtcaaaccttgccaattaccgaaatcgctaaaaagcttggacttaatgaacaagacttagagttatttggatcagataaggcaaaaattaactggtcagctatcaaaaatgctaaagcaaatcaccatttaggaaaattggttttagttacttcgattagtcctactccagcaggagaaggcaaatcaacaatgactattggtttagctgatgctttaaataaccaactccatgaaaaaactttaattgcactgcgtgaaccctcaatgggaccagtctttgggttaaagggtggagctactggtggtggacaagcacaagttattccaatggaagacattaacttacattttactggtgatatgcatgctttgaccagtgctattgataccttagctgcattagttgataactatatttatcaagataatagtttaaagttggattcgaaccggattcttctaaaacgcggccttgacgtaaatgatcgtactttacgtaagattaccttaggacaaggttctcgttttaatggggttgaacatgaagcgagttttgcaattacagtagctaatgagttaatggctattttgtgtcttgcaacttcaattatcgatcttaaacaacgcattggtaacatgttagttggttattctactgaagataagcctgtctttgttaaggatttacattttgaaggggcaattgctgcacttttaggtaaagcattaaaacctaacttagtccaaacaattgaacatactccagctttagttcatggtggaccttttgctaatattgcgcatggtgcaaatagtgtcatggcaactaatttggctttacatttaagtgattatgttgtaacagaagccggctttggaagtgacttaggtggacagaaatttatggattttgtttctacacacttagaaaaagctcctgatgcaatagtggtggttgctactgttcgtgcgttgaagtaccaagctgaacaatcaactgataacttatctaatgaaaacttggacgctttaagagaaggattcaaaaacttagaacggcatatgaataatatgcgtcaatataatcgtccagtaattgttttaattaataaatttgattcagatacagatgcagaacttgccttgctccaagatttgattgctgaacatggcattgatagtgaagttgtaacttaccataatgatggatctaagggtggtattaaggctgctgaaaaagttcgtgctttagttaaccaggaacaaggcgaaataatgcgttcttatgctaaagacgatacaattcaagttaaaattgaacaaattgctcaaaaaatctatcacgctggtaaagttgaatacagtgaaaaggcacttgaccaaattgagcatttaaaagaacttggaaaagataaattgccggtaattattgcaaaaactcaatatagttttagcgatgacaaaaaagttctcggagcaccaacgaactttactttgcatgttaaaaacttagccttgaaaaatggagctggatttatcgtggtttcaactggttctattttagatatgccaggtttaccaaagcatcccgctgcattagacattgatatcgatgatgatggaaagataagtggtttgttctaatgcaactactatatctatttatcgcttttttagttgttctttgtgatcaaggtttaaaatactacattagtcatagttatatgttaggtcaggaacatacattaattgatggtttactatcatttacttatgttaaaaattctggcgcagcttggaacattttaactggacaaatgttgatattttacataattagtattatcgcaataattgcttgtttgtatttcttgtataacaaaaaatacaataatccaatctttaaatcaggaattggccttgttttaggtggagtaattggtaatttcatcgatagattacatttaaagtatgtcattgacatgattcaattagattttattaattttaatatctttaatattgctgattcagcaattactgttgggataatcttaatttttatctatttgatctttttctcagataaggatgaaaaatagtgactgattttgaattaaatgtttcagctaaagcaggacgattagacaaatatataagtgagcattctgatctatcacgctcaagagtccaagaattacttactagtggtgatattttagtaaatagtaagcaagaaaaacctagttataaggtcgcaattggtgataaaatctcagttcatgttcctaagctagttccactaaatgttgaaccagaggacattcctttagatattgtgtacgaagataatgacgtgattgtggttaataagccgcaaggaatggtagttcatccctctgcaggtcatcccaatcatacattggttaatgctttaatgaaccatactaaagaactagccgctagtcctgaaggcttccgtccaggaatcgttcatcgaattgataaagatactagtgggttattgatgattgccaaaaatacccaggctcgtgaaagcttagaaagtcagcttgctcataaaactaataaacgtgtttatttggcaattgttcatggaaatttcaaagaagcatctggaacaattgatgcaccaattgcccgtaatcctaaagaacgcaaaaaaatggcagttgttgaaagtggtaaagctgcagtaacacacttcaaggtattagagcaatatcctaattatgcgctagtaagttgtcaacttgaaactgggcgtactcaccaaattagagttcatatgaaatatattggccatcctttagctggagatccattgtatggtccaaagaaaactttaaagggacatggtcagtttttgcatgcaaagatattaggctttaagcaacctaaaactggtcaatggcttgaatttcaagttgaaccaccagaaattttccagaaaaagcttacttatctgcgaggcttgaagggataggttatagatgaaacgatatttgatattagaagatgggacatcttttgctggagaaagttttggagctgaaactatttctacaggcgaattagctgttcagacaagtaattttggctaccaagaagctttaacagatccgacaaatgctggcaaaatattagtttttaccacaccggtgattggtacaactgggattaactctattgactatgaagctattgatcctaatgttcgtggtattatttgtaatgaaatcgcaacccatatttctgattctcccaattttcaggaattagactatttcttaaaagagaaaaaaattcctgctatatatggggttgatactcgtgcacttgcccataagattagtaaccaaagtaaaattaaagcttctattatggatactaatgatgagcatgcatttgatcagattagagccttagttttaccaaaaaataaaacagcaactatttctacttctaattcttatgctgctcctaatatcggcaaaactatcgcagtagttgatctcggcttgaaacattcaatgctgagagaattgtctttacgcaaggctaacataatcgttgttccttttaattccaagccacaagatatccttaatttaaagccagatggattagttatctcaaatggtcctggtactgctgctgaggtcaaaaaaggattagcaccactttttgatgagttttatgggaaattgccaattttaggaattggtttaggatttttagcaatatgtgattatttggatatcgaattaattgaccttcctaaaccgtttaatggggttaattacccagttattttgcaaaattctaatacgatttggcagacagcgatgaatattccgcaacttgctctttctgaaaatggtggcatcaactttactgaaacatactatgatttgcatagtgacttattagcgggtttttatttaaaagataaagaagttctggcaaccgcctttaatccagaaggagctcctgggagttttgatggcttaaggatttttgatcaatttatgcaattaatggagaagtaaaatgccacttgaaaatgatttaaataaagtattagtccttggaagcggacctaatattgtaggcagtgttgctgagatggatgcttataccaactccgcaattaaggcctttttagaggatgatattcatgttgtcttggtaaaccctaatccggcaactgtttcaagtgatcgacaaaaaggggttactgtatacttggagccgatgactttggcctttatgaagcgaattttgcgaatggaggagccagatgcaattgtaactgcctatggtagtactaacgcattggccgttgctaaagagctacttgatgatggcataattgatgatatgaaaatcaagcttttgacaactaataatgagttacttaacttagttgatcataaaaagcaaattgcctttatgcaaaaaaacaattttgcgacttgcgaatcctggcatttggttaaaactgacacaaacgaaagtattaccgacttactatcacacgcgcgctttccacttttagtaactaaatatcatcaatatattcataatgaacattttaagtttcaaaatgtagcagacctttcggaattttttaaagcagaagctgaaactgaagcagatcattttaacctaaacaattatcgtttaactgaagacttatctaattgggaagaagttattgtcgatgtattaagagataaccgtggtaattttaactttattaatatttcttcatgcttagaagatgtggcgattaattctggagattcgctaattatcagcccagcattgaccttaaacaatgatcatgttcgaaaaattagaaaattaagcaaaaaaatcatgaataggttaaatattcatggctttttgagtattcactttgccgttagccaccatgatacagaaattgagctaaaagttttatcattaaagaaccgcttaactcggactagtgttgttgctcgaagagttgcaatgtatgatatcggttatgttttagcaaaaattgctttgggatataactttaatgaaattatgcagcccttaactggacaaaatgcggctattgaacctgttttagatgcagtttcaatcaaattcccatatttttcatttagtgaatcaggcttaaatcactatgaattaggtgacataatgcagtctagtggggaaagtattggtattggtcgcaattttgaagctgcctttttaaaaggattagaatctaactttgatattaatggcttgcgagatttttattatttagaaaagaagcaagacaggcaacaacttttgcaacgattagctaatcctgatgagctgcatattattactttgcttgcagcaataagtagtgggctaacatacacccaaattcatgaagtatgtcgcttgcatccgctatattttgaaaaattgactagaattgttgaaattgctaagcagctcaaaagtaacttatcaaaagatagccttgaaatagcgaagaaatttggtttttctaattcatttattagtataatcacccaaaagagcttggaggatatcgatgatttatgccgagagtataattttaattcttcgtatcttcttttagatgggagcgcaggcttgtatcaggcaaattgttctgtttgctatagtagttttagcagtgaaaacgaagttaatccactcaactctcaaagaaaagttttaataattggtatgaaaccaatgcaagtttctttgactagtgaatatgattatatgatttatcatgcgttgaaaactctaaaagatgaaggcattgctactgttctaattagtaataatagtgaagcagtatctaccgcatatgaactagtcgatcgggtatattttgaaccaattacttatgaaaacattgtaaaaatagcccgaagagaggggatagatgaggttttaacgcaattttccggtaaagaagttaaccaactaagacctaatctaatcaaagcaggattaaagctgctaggacaagaaaacttaatttctgagcttacaaagcaaaaaattaatgttgaaggactaccaattgagttagtacctaataaagaaattttcacagaaggacaagctaagcaatttgctgaaaaatatggctttcctgttttaattggtggacaaaatcgagaattaaaagtaaaaagtgctgttgtttatgatattccggctcttgaaaaatatattaatgagaatgatttagacgaggggactatttcacgctttattgaaggaagaaaatatgaagtaattgctatttctgactctcaaaatgtaacaattccaggtattattgaacatcttgagcagactggctcacatgcttcggactcaattgcagttttccaacctcaaaatttaaataaagagcaaagagcatttttaggtaagatgacaaaagaaattttgccactaataaaaatgaagggcttatttactttacactttttgcaagcagatggacaattttacttgttacaggtcaagacatatgcaggtcataacttagcctttttgtctaagtctttgaatagtgatttagttggaatcacaactaaatgtttattaggcaaaagcttgaaagaactgaatctacctgaaaatatttggccagctagtgatttaatccatgtgaagatgccagtcttttcatatattgactatcaaagtggaaatacctttgactcaaaaatgaagtcctctgcttcagtaatggggcgggatacgctactttccaaggctctgtataaaggatatgaaggtagcaacttgaccattccaagttatgggacactctttatctcagttcgtgacgaagataagcaacggacaattaatttagcacagagattccatagattgggctttaagttagttgctactgaagggacagcaactattttagcagaagctggtattacgacagggattgtcaagaaagtacaggaagatcagcataacttattagaaaagatagctagtcacaagatagttatggttattaatgtgattaatctttcagataatgcaagtcaagatgcaatcagaattagagatgtcgccttgaatacgcatattcctgttttttctagtttacaaactgccgagttgattttagaagttcttgaaagtttagcattaaccacacagccaatttaggaagtcttaatatattttctctaaaaaattgcttcttattcatagaaagttcacagcttacaggcatactataatcaaatctaagataaaggaatgattaatatgtcaaacaaagttagcaatactagcttaaataagcaagatattttggaaaatgctattccacttgtagcaaagaaaaagcatcgtttgcttaaatctgttggcattacaattgtaagtttatcaggattagttggtctgggtattttaggtagaaaaaggctcctattttaaacaatcaatgtcgaagtctaaataaaaataataagtgaacaaagccctgtttttaccagtaattggttaaagacagggctttttagtaaggattttatgatacctttgatattcttcggagtatggtcttattttatgattgattaagagtaaagattatatagagaagctggtatatttagcaattctctttataggaatagataataatcaatgctattatgatttcagaaaaaatctattttctatttagagggaggataaaatttccatgtttactctatattttatggctattgatttattagaagataattcaactgaatgggtatataaaattacaacagattatcaagaagggcaaataactattaataaacaaacttttgatagaaaacttacctcttttgaaaaaacaagcaagtgtgttcagataaaaaaagaaactgtagaatacgaaatttactataggattgctaaattaatgaaaataaaaccaggtattaaagaatattattggttgcattctagtaatttttcattaatgccatatgttaactttatgtcagtaaagttattagaagatactgatagggaatggatatacgaaatctatactgattgcgaagaaggtatggttataattgataaagaaaccaaaattggagatattacctcttttgaattaactagtaaacagcttaatgtaaaacgagaaaccgtagaattttggatttattactgtatacttgatttaatgaaaacggatcctggtatagatgaattttattggataaacgtaaaactagataaagattgataatactagatttttataaaaagatactcaacatttttattacaatgatgcataataattaaaggaaaagactataaaaaatggtgggatagttttttatgaaattagaagtaaaaataagtaaaacaacaagaaaagaaaaaattataagtgcaatttcttattcaatcttaggaattattatttggtacttcttctttagaaagtaagaagtttgattgtagaactttatctatagtgtaagtgcattaaggagagaattaatttgttaaatttagtcgacacaattctagaattaattatcattttattaactttgtgttttatatatagcataattaaaactcaaattttgattaaaaaattggaattaaagattgaggaacactttaaaagtattcctcagaaaaaataaaaggagagcaaactgaaagatagtatatcagcaatgaaataggatatttactgtctttcatttaaaagaaaatgcaaattttaaacctaattataaaatgtgagatattaattgtctttttttgattttaggaaatatttttttatttatacttttatttatacaagggaaaatatatcagcaacatttaaaaaaattacctcaaagaaaagaacattagtgactatcaaatttttaaagaagttattcaaccagcgctaatgcattaaaggaggacaatgttaaaattccagaaattgtaaaaatagcaacttggacaatatcagcacaataaatattagatgagctaatttaattgaagggaaaagagtttaaaataaactcttttttattttgctccaaaagagatagagccactattttgctactaattagtagcaaggtattctagatattgttataataatattatcaataataaataaggagagttcagatggacgttgctgaagcattagcaagattaaaatttctcgttagacacaacaaatttaaaatggtcaggagaactgataaaatggcaatgccagtttctgtaccgcttgctaaagaattaattaggcaactatcaattgacgactttgttaagcatgaacctaatcgtaacaatccattacaatttgtatggatatttaaaactgctgatgaacagaaatacgaaactgtcaaattttttgtgtaaatagatctttctcgtaaattgtttttttaacgttttatttattcaaaataggattctaaggtatcctggacttgaccaaagcctttgtgaattcggttgaagtagcggtcattgtagctcattgcttggatgccaataaaagtatcaagcgactgttcagtcgggaactccgctttaggcttagccttgcgcttaatgacgttattaaaggattcgatcatgttggtagagtaaattgaagccctgatctgcttaggataattataaaaaacaagcaggtctggctcgatgtctttcaggtttctaatgacacgattgtagctcttgttccatttggcataaaaagcatgcaatacatcaacagcagccgctttattggcttgctggtgaatctgcttgaattcgttcatgattgcctcgcgatcgtccacgcgtactttagcgcagatgttgcgcataacatggaccaagcagcgttggaaatgagcttgaggataggtctttgccagtgctgctttcatgccgacaacgccatctgaaaggaaaagctctacttgctttaaaccacgagatttcatgttctggagcaacgccgtccagacttcaatattctcactaggcgcaatgtagtagtcgataacttccttgtgaccattaggcttgatgccaatggcaatatatactgcttctcgttcaaaagtttctcgacgcaacggtatatacgttgtatcaagataaacacaaaagaacttatcgctcagcttacgcttgtgataagcctcaactttaggaatcatttgcttagagatattagacacttgagctggactataatgactgccatacattttttcgatcaaattagctatttctctagtggttacacctttagaataaagctttataaccatatcttctaagagatcagtatgttgtttatagtctggcagagtgtgttgatgaaacataccattgcgatctcgtggcacttgtacctcaattgatccaaactgggtatcaattttacggaaatacgcaccatttctagaattaccagtattccagccatttctagcatagggatcatatcctaaaaaggcagtcagttcagattctaacatgtcattaacagcttgttggatttcatgacgaagcaaatcattaattttatcttgattgaatagagcttgagttatatttttggtaaaatcattcatgaaggagttcttctttctgtatgttttttttgttcaaaccaatcatacgagaaaggaactcctttttctaatgttttaggaaattaaattaaggaataattcatccttacacaaactattttacggtctcagaaatactatataaagtttgtttttacagaaaataacaatttagtagtgtttatcagttttcatctggattattaaggaggaaagttacatggtttacaaaaaagattttacaacaacctacacaatcaatgaacatgaatactcaataacttctccagctctttttgatagtaatacaaatgaattgattcccaacaatgaattagatgataaagctgctgaaaaggctcgtcagttatatcgcaaagatatggatttaatttcgcctcaagacttaaaaaaatatcgtgcaaaattaagtttatctcagagaaatttagctgaattaactggattgagccccaacacgattgctttatacgaagcaggtgctttcccaactgcagcaaataataatatactaaaagctttaataaaaaatgatcaagttctacaacaatatttaattgataactctaatcaatattctgatgaattactttcaaaaataaattcatatcttaaaaatgaaaatagcattatttcaccagataaaataaagcctaaatatacggctgttcaattagctaattggctactcgttgaaaattattttgaaagagagtgcaataagaatattgatccactttctcaaatgaaagtaataaagttgctttattttgcatatgggagatatttagcttctactaagaataaattattttcttctccaattatccatttacaatatggccctgtagttactgaagtacatgagaagtttaaaggacaaactgtgttaaacgatgagaaaatcgaaaaaggagcgattgaggattacaatacagtttctcaagatggagaaatatcagaattattgcatgcggttaatcaaaagtatatcgattatacagcagctgggttaagcaaaataacacatcgaaaaggctctccttggtctttaacacaagaaaagttgataattaaggatcaattaatttttgatagttttagtaaaggtagagaagaataatcaaaactaaaagtcaaaagagttcaaaatagaactcttttttattttgcctgtgtcagcaatcattttgataggaatacatgaggtttaatgctattatgatttcagaaaaaatcaatttaaatttataatggaggattaatcttctatgattactttaaaatttatgtctattgaattacttgaagataatcaagatgagtgggtatatagtatttatactgattatcaagaaggacaaatagccattaacaaaagtaattttgacgggaaacttacatcttttaaaaaagctagtgaccttcttggtataaaaaaagaaacattagaaaacattagaatacgaaatttactatagaattgttaaattgatgaaaactaatcccggcatcaaagaaaaatactggttgcattcaactaagaaaatggagccgctagattaagcaaacactataaaaagctctgacaactgaggtatttccaaagtttgcacaatttcggcacaatttttgtgaaaacacaagggtagaacattgatacataagcattcttagatacaacttcgtataatcaatattatgtaaagttatatggtgaatttaaacacagcctaagaccaactatattaaacattcatttcaaatcagccttacattagctaaataaaatccagttgattatcttacacatattatttttgtcacaacatcaaaccagataatttataagtttgttgctgtgctttttatatttaatcattttagaatttgatttatctattaatataatcgtataattccttaacacttgtcattaagtaacaacaacatatatacttaattgatatatgataatcgatgctgagagcgcaattctacagcaaatatattcaattcaattaataactaataatctcgaacaaatcagcatgtagcaatttaacttaaatatttggattactttcaatatattgctgcaaaaatacatttaaattcagtcattttattgctactaaaagttaggttatctagacatatctaaggtttagatatgaaaccacttaataaagcgtaatcacgatagataggcttgtcagtacaaagataagttatttcaaatgttgctgcattaatattttctgctctatttgtaatttacatgttttcttgatttgcttgttttattgatatcaaattgctagtataatttatactatacctagcattaaaactataattttaatgctaggtagcaaaatacctctctcgaaagtacaatttttatgaatttggagtttttactttggaaacaaaaaaatatttaactttaattgatcaagaattaaacaatttaccttcgtttattcgtgaatataatttaagcactaatcactctctaacgactagttatcaatatttaactgaaattcggcgtttttttgattggcttcgacatcaatctctttcccctgcgcaatctaatgctgaagtatctattaaagatttagctcgactaactcgcagtgatatgatgatttatattgattttttgcgtcatagcaagaatcagcaaggtcgacttaattcgccaactaccgttaaccgctcgattaatgctttacgttcattattcaaattcctgacaattactgcagataagccgttttttgaccataatataatgctgaaaattcaatctctaaacaacttagaaactctgaattatcgtgctcacgtattagaatcacatatgtatacaggaaatcttaagtatgaatttctagaatttttgacaaataaatatgctagtctttgtaacaaacaagccctggcaagttttaaggttaataaagaacgcgatattgcaataattgcactaattctaggtactggtgtccgggtatctgagtgtgcttcgattaacttatctgacctaaatttgaaagaagcaactttagatttaactcgtaaaggcggtcaaaaagactcaattccggttgctagttggactttgccatatatagcagcgtatgcagatattcgtaacaaacgttatcatgctgaaaaaaatgataaagccttcttcttaacttattaccacaaaaaaacttcgcgcattactcctaatggtattgaacgtttggttggtaaatattctaaagcatttggtcaccctcttaccccacacaaattgcgccacactctagcaagtgaattatatggcgttactaaagatcaagttctcgttgctcaacaacttggccaaaaaggtactacagcaacagatctctacactcatgtcgatcaaaaagaacaaagaaaagccctcgatcaactagcaaataatcaaaataactagtcccctctcctcctctgctaggggagcagtatcttaaaaattgcattatttaacaagtgatattatttaaagataccattaaattatgttatattaaggttgagttaaatagttgtgggagaacgtttaattcaataaagcccctatctgctttaaataatattttatttagtgtttagggttgtgtttttatagagggttgtgactttgaatggatatgtgtttaggcgctgtaatacgtgatagacgtaaagctatgaagttaatgctgaatttagtggtttatctgttaatttcatttcaagaattgaaagaactggtgaccagaacatctcaattaaaaagattgacgcaattgctcaatctttgaacatggatacaccatctttgattgctgcagcatacggtaaagtagatatatctaattataaacttaagggtgatgatatatttatccaaaagattgtcaatgaattacgaaaattatctacttttagagccgaaaaagtttgcaaggcaattctttcgttggttagagaaattaatgaaccaacaagatttaattaaaaaaggagtttcaataactccttttttttgttgctttaatttttcttagttttatcgctaataatatgtcctccaccaacactttgaatacttaccttgcttcctttcttatatagaatggcattagtatatttcataatttgcgtacgtgtgtcagatttatgtttaaacttataagtgacttcataacttacttgggtctcattattaccaagtggtaaaacctttgtaatctttattgcagttgaatatgatttgatcttaccgtctttattaaagcctgcaaacatttttcttaacgttttataatctgtgttattagttgaatttacgaaatctacgctgctactttttttgctgaaggcttttgccaataatttcttagcttcttttgaagttactaagcctttccaagttggcgtataaatatactttccattctttttctgcaagttcccagttacttgtccctttttagcaaacactgctaatgaagaactaacttcggaatcaattgttgaatcatcattctcataactgacaaaaattttagttttattagttattggataattacttatagttgcctttccatggttattgagtgtagcaaccttcttattattgatatatatacttgcatttggtaaggactgaactacaaatgtcagagttttaatatccatttttacagtttggttggtaaataaattaatactctttgatgtacttaaattgcgacctgataacttaacttgagtagttaggttatattgtccaacaattagtttattcacactcacagcaaatttagagtcctttttagtcatgctcttatagctattattaatatttaacttagaattagcatgattagtagtaacggttaaagaatatgttggtaaattcaacttatatcttggaaaaacaagccaatatgcaccatctttaattaatctaattgaatttttgtaagacttattatgactaatagccttaattaaactgttagtttcagttggattcttaactaaaaaatttctaaatggctttaaatcattttcattaatagtctcagctttatcactaacaatatattcagcaaaacccttcttagctggattctctaagtaattagttatctgagacagttgattatcacggctataataattcatcccccaaaatgacaaaaataaaacagaacatccccctactaaaagaccaattatcaaatgttgctttcttttagataactggctttttggtaaatagttaaaaagatgcttaaaagaataattttgattaaacttaatccacttttgtcgtaatgctaaaaaatcaacattattaaaccatttcttgttattgcgatacttatttacctttttaaaatctcttctagttaaaaggatacgctttctttcagcttcggaattaggaacaattcgtgtcttttgatttgcaccacaatacgtacaataaatatcagctttattaattttatgtccgcaattaaaacagtaacggatactcaaaaaatccaactcctacatctatattatgtgaaatattatactttattaattgtacaaataagaataattttttcttaaaaaactgttacactcctatttttagcaataaaaaaactagcttagtaacaactaagctagccttttattaatagatagaaataccaacagtattgatatatgcactaataataagacttgcaaatgcaaaagttaaagcaattaaaatagcaaataaaagcaagaataaaaagctagcaaaaattggatcatgtttagcctcttccctacttgaaaaaagcattttaaaagttgcaattacattaatccaaattgcaacaaagccaaaaatcatagttgcaatacttgtccattctgtagttgaatatgacaaaactgccataacaataactgctacccagctaatagcaatatggtgagcgtaatcattaataaagtcaagtaacttaactggcttttcagactggtaaataaagttatgagtaaaccaaatgatagcaatatatactaaacgtgcgattacaccaaataaggtaactccaatcatccaggctttagaagttaaaataccatataaggcattaaaatatgcagaagtagcagctaagtattgtaaggcagtataatcgctttgtttagcaagtaaacttgttaattcaattaccaagatagttacaattccgaaccaggcttgtccctttatagctttattagggctggtaaaggctgtttttaaccaggttgagatggaacttactgcttgctttgtattttctttaggttggttttccataaaatacctccatattcagactatgtatagtctaatatagatagaaataatagacaaataaaagcgaaaatgttaattcttcttttaatcatcctattcaatcagcttagatatttatctgcagcttattattacaaaatttgataagaaaaaacacaatgagtttcacccatcgtgttttttatcacttgttttatattatgcatcaatttcaggtgctttacctaattcagcttgaagcatccaaattctcttttcagtatctgtcttaaagccagtaaagatatcattacttgaagcgtccccttctttatcagatacatcaattcctttttgatataaatctgctaaataacgataatctttaactaagatttccaatctttcatccattgtacggtcccagcgtcccttttcatcaggaatcttggtattgtccgcaaattcccgtaaagttgaaaatggagctccgtcaatagcaattaaacgctcagaaatgacatccatttgttcatttaaatcatccataaatttgtccatcagtgggtgcaacttcatgaagccccgcccccgcatgtaccagtgtgtttggtgaacaacagttatcatttgatttaaatctgcaactaattgattaagtactttctttgtttcttgatatttcataatcagacctcctatgaccaaagtctatctttatcatagttaaaaaaatactaaatgtacaatgattagcttaataattataatttatatttttttgcgaatttacgataagtatttttacttattaagaatatttctccatcttcacgagcaattacaacatagactaattttgctaatgtcgactttttaggggcaatataatcaaaagttaaataatcattattataatcaattaagtcaatctgaccatctaacccttgaaagaaactacaattatgacaatagtcgtcaactttttgtattaattcagtaatcttcataaaaatcctcctcatatttaaatacacataaaaaggaagagattttttataaattttctatttttataaaaaaagctaccccatggtagctttcacctgttaatttaacttaactttattaatatctttcatccatgtaataccaatggacttttctccaaggtgagtcccaattacagggccaaattcaccaacttcaactggattttctgggaaattctcatttacccaactcttaatttcttctgcttgtgtagcatcattagaatgaactactaaaaaacgcaaatcttgtttgaaaggtagcttattaaccttttctaaagttaaactttcaacttttttaacggcgcgcttcattgaacgaaccttatcaaaagctacaatcttatcactatcatcatcaaaagttaatagtggtttgatatgaagcatagtacctataaaggcaccagcattactcaaccgaccaccacgactcaaattattcaaatcatcaacaataaataattcatcaattgaatcacgaatttcgtctaatcgagtaataatttcctctgcagacaaaccatttttgatcatcttggcagctgctaaaacaagatagcccattaggcgaatagtaatctttgaatcgtatggataaagattatattcaggattggtgtgtgcaatattcattaaggtttgattgaaaccagatatagttccagccaaggtaatagttataataacgtcatacccttcatcatggagtctgttaaacagactaatcatttcacccatgcttggttgggatgttttaggaaaggcagcgccagcatcttgcattctaaatagttgatctgcagtgatgtcaatgccttctttaaattccttgtcacccacaatgacaggaataggtacgactataatattattatccttaacttcttctttagttaaatagctagtactatcggtgattaatgcaattttcacttcaataagccttccatctctaggatttaattaaagattattatagcataaataataattctagtcgaagtaattattgtatagtttccttatttaattcagtttgaatagaatctaaatgagttaaaaaatccttagtttcagtttcactccataatgcataaatcttattatgaattgaggtaagtaagtgttttaattctgaagccttaaaaacccccgtctcatttaaacaaactaacttacttgaatccgtctctgatcgaacaacatcaataatctcttgagttttcttttgttgcaattgccgactaagagtagataaagaaatattcaatccccttgcaagttcccccatcgttagagaatcattttcattttcatcgaaaaaaagtaagatcctagtttgcgagagattcaacccagcttgttcaagaatcatttttttgatagactctgctatttcattgaaatgtaaaacgtccatatttactccctataacaaaatagttatcaatattcatagcaaaacttcaatagcacggcagcaataataaatttgttattgaaatgttttcttaattgacttaaattagtttaattcaataatggtattagaacaactcttgatttttttaagtttcgtggtatttactatgcataaattgttagtcctcttttttaagaaaaaattggtctagcttatgcaagagatttttttatctcgttctatattggtataatagaaattagtttttatttgaggtgagattatggcttttgatggtctatttatacatagtttactaacaaatttgtcccctaccctattaactggacgtttgactaaaatttatcaaccatttgagcatgacttaattttggtttttagaaaaaatcgaaaaaactatcaacttttgttatctattaacccccaatatccccgtttttatctgaccaaaaactctttggataatcctaaagttgccccaacatttgttatggttttacggaaatatcttgaaggctcgattttgcaagatattaagcaagttggtcaggatcgtattatcaatttttctttttctaatcgaaatgaactgggagatgaagttgaattagttctttctcttgaacttatgggacgtcacagcaatgtgattttatataataagcaagacggaaagataattgatctactaaaaagagtaaatcctgatgaaaatcgggcgcgtctacttttacctaaggcaaaatatgaactccccccacttaatccaggaatagatggctttttattatctaaagaggagttttctaagttagcaaaagaaaatactccttttgattttgccaaaaaagttaacggtttggaccgggatgatcgattagaattagctggctatttagaagatgattatagtttcgatagttttaaaacattcttcaatcattttgataacccgaaggggtatatttttcgcaataataagcgtaaggaaaagattttcgtctatcaaccttatcacttagacctaaccccatattctaaaaatgaagatataaaccaggccttagatgaattttatcatgagcaagaaacacgtgattgggttcatcaacgagcaaaagttgtcttaaatatcgtatctaatgaacaaaagaaactttccaagaagttaattaaactaaataatcaactagaccaagctgaaaattcggaagactatcgcattaaaggcgaattattgaatgcttacttgcatttagttaaagctggaatgacggaagttgaagttcccaactattatgacgaaaatcgccccttaaaagttcacttagatccggctctctctcctgctagaaatgctcaaaagtattttactaagtatcaaaaattacgtaactcaattaaacatgttaaagagcaaattaagttaacccaggaaaatcttacttattttgattctattgaaacagcaatcaataatgctgagcctgaagatattgatagcataactgatgaacttgttgctcaaggatatattcgtcgtaatcgtaagcaaagaaataaaaagattgatgagaagtcgcttaacaagtttaaattgtcctcaggtaaaatcgtcctcgttggtaaaaataactaccagaatgactggctaacctttaaaaaggctaataaaaatgacatttggttccatgttaagaacataccaggttctcacgttattttgaccgacagtcagcctagtgaagaagatattcgcgaaactgcagaaattgcagcttacttttcaaaaggtcgcctttcaggccatgttcaagttgattacgtggcagataaacgagttaagaagcccaatggtgctaaaccaggatttgtaatttatactgggcagaattcaattgaagttactcctgaagaaaagagtgtactttcgaagagaattgataaatcaacagtaaaataattatgtaaaaaaggtgttaactttagttaacacctttttttactctcttcaattattatttttctacagtaataccttcaatcactacatcgtcatttggcttatccatattgttcgtagcaactttagcaattgcatcaacaacatccatcccatcaataacttgaccaaaaacagtatgatggaagtcaagccaaggtgtaccaccttgcttgtagcgtttaataacttcttgcggataaccagcttctctcatatcacgagtgtagcgttttggcatattttggttttgtacaatgaagaattgactgccatttgtacttggaccagaatttgccattgacaatgcaccacggaagttaaataattgtgaactaaattcatcctcaaatgggtgtccccagatactttcaccgccagtaccatcccccttagggtcaccaccttgaatcataaagtccttaattactcggtggaaaattacaccatcatagtagcctttttccgctaaacgaacaaaattttcaactgtcattggagcttgcttttcaaagagttgaatcttaatatcgcctttattagttttcatagtagctgtaggaccttctgctgcagctaaatctaattgagggaaaatcattttttgcttattatctgacattatttttcctttccataaaaaaataagaccctctcgagccttattttaaactaagtcctgctattaaccttcaaatgcttcagttaatggaggaacaacttgcttcttacgtgatacaacacctggtaattcaacagcgctgtcaactaacttcttgtcaaaggccttttcaaataatgacttagtttcgtcactaccaacaacaataccttctgagttactttccaagatatcagttaagacaagaacaaacatgtcgtaactatttgccttagaagaagcttccattgcgccgataaatgcagcttttctttccatagcttctggtaagtcaacagtgttaacttgagcaattcttacagtgtgaccgtttaattcaaagctcttagcatcaagatcaattaagtcttcttcgctcttgtcagcaatgttagtaccagccttaagcatttcaagaccgtaactcttgtaatcaacaccagcaatcttagctaaagcttcaacagcttcgtgatccttgtcagtagttgttgggctcttcaaaagtaaagtatcagaaataattgcactaagcataataccagcaatgttttgtgggatttctaaacctttttcgttaaacatttgccataaaacagttgaagtacagccaactggttcatcacggaagtaaagtggtgcagcagtgttgaagttcataattctgtggtgatcaacaacgtgggttacagtaaccttgtcaatatctgaaacagattgttgtggttcgttgtggtcaacaagcataactgcatctacttcgtttgctgcagtcttaattacacgtggtgcttcaaagccaaacttcttaagtgcgaatgcagtttcatcattaggttcacctaaagcaactgcttctgtatcaaaaccaaagtggttttgaaagtatgaatatgcaattgcagtaccaattgcatcggtatctggattttggtgtccaaaaattaattcttttgccattgtatctacctcttttaaactttctatccttagtttactagaatttttaactttgtaaaagcctaactaaaataattctgaaatatcatcgcgaccagcatgagttggcttacctaaagttaaactagttggttctccatcccctactggatcaattacaaatgaaccatttgaataacgatcacctaatgggaagtcattagtcttaattgtcatagttctagcacttgatgtttcaattatcaattcatggttttgtccaaataaggcaactccagaaatgcggtgtggattcttctttaattcacgtaagactaaaactccacgcttagcccggctaaccttgttaattagttcatacttgaactctttgaaggcacctctttgcgtaatgatacctaatttcatcagattaagatacttaggatcaactgtgacataatcaaccacatagtcgtcatccttcaagttaacactcttaaccccagctgctcgggcaccacttgttggaatttcactaatatcatagcgaacagcataagcttggttagtaaagagggtaatttctttcttagtatcaggaaccacaccttcaacgtgaattacacgtgaagtgtcctgcttaagtttcatggcaatcattgcccgtgatttataagttcttgttggctgaatatcagctaaggctaattgcttaatgtaaccatcattagttgccaaaacaaagttaagcttttcatctaatttagcaagttcaaaaaccgaaacaatttgttcatcggtatcaagaccgagttcttgtgataagtgctggcctggttctttccacttagcttcaaccagttcatggacaggtctaaaaattacattccccttattagtaaagagataaaggttggtcaaagttgacatcgtcttttcaaagacaaccttgtcaaagtcaggcaacccattttcactatcatcagttgattggaatgatcgcaagcttgaccgcttaagatagccatcacgtgagacaagcacacgaacatcttcttcagcaactaaggccttttcgtcaatttcaattttagctgtcttacttgaaatcttcgtccgacgatcactaccaaattcttttttaactgcattaagttctttgataatttgcttttctaaaaccttacggtcagttaaaagcaagttgtagttagcaattttttcttctaagtcgctcttttcagcttgtaaggcattaacgtcagtattagttaaacggtaaagttgcaaagaaacaattgcttctgcttgtcttggtgtaaagctaaacttttcaataatgttatttttagcatcagccttattcttacttgctcgaatggtcttgattacatcgtccaaaatatctaaagcatgaattaaaccttcgataatttcaagtctagccttagccttcttcaaatcatattgggttctcttggtaatgacagcttcatcgtgttccaaatatgaacttaaaattcgcttcaaaccaacttgaactggtgtcatatggtcaattgcgaccatgttaaagctataagatacttgtaagtcagttgatttaaacaagtaatttaaaatattttgactgtctgcaccttttttcagttcaatgacgattgataaaccatgacggtcagtttcatcacgaacttcactaatcccgtcgatttctttgttcaaacgaatttcgtcaatctttttaactaagaaggccttgttaacaccaaaaggaatttcagtgaccacaatttgctgacgacccgctttaatatcttgaatactagtcttagagcgaacttgaatccggccgcgacctgtttcataagcttccttgatgcctttatcacctaagacaattgcaccagttggaaagtctggacctttaacaaactgcattagatcagctaagctggcatcaggatgctttaataaataaattgtcgcatcaattacttcagctaaattatgaggcggaatttctgtcgcatacccagctgaaataccagttgcaccattaactaataagttaggaaattgcgccggcaaaaccgttggttcatattcagtatcgtcaaagttaagcaccatgttaactgtatctttatcaatatcagctaacaagtgattagaaatcttacttaatcttgattcagtataacgcatggcagctgggctatcgccatccattgacccattattaccgtgcatttcaatcaaaggttcccgcatcttccagtcttgtgacaggtgaactaaggccccataaatagaactgtcaccgtgtgggtggaagttacccatgatattcccaacagccttagccgccttcttaaatggcttatcataggtattattatctaaatacattgcgtacaaaatacgtctttgaactggttttaaaccatcacgaatatctggcaaggcccgctcttgaataatgtatttagaatagcgaccaaaccgttcacccatgacttgttccaagggcatttcccgaattctttcggtcttttgcgccattaattattcctcctagttttctgcttcaagaattgaaccttcttctcccattcggaatttaacattttgttcaatccattttcttctgacttcaaccttgtcacccattaatgtggtaacacgtctttcagcaagtgcagcatcatcaatcttaactcgaattaacattctagaatcaggattcatagtagtttgccaaagctgatcagcattcatttcccctaaacctttgaaacgttgtaagctataacctttacccatagccttttcatcacgttctagctcttcatcagtccaggcatattcaattttagctttagctccactacctttttgcaaacgataaagtggtggtaaggcgatgtaaactcggcctgcttcaaccattggacgcatatagcgatagaagaaggttaaaagcaagatttgaatgtgagctccatcgtcgtcggcgtcagtcatgataatgattttgtcataattggcatcttcaatcttaaattctgctccaacaccagcaccaatcgtgtgaatcatggtattgatttcttcatttttgaagatatcttgaagttttgccttttgagtattcaacaccttaccacgtaaaggtaagattgcttggaacttacgatcacgtccttgttttgcagaaccaccggcagaatccccttcgactaagaacaattcattcttcttaggattacgtgattgggctggcgttaacttacctgataaaagttctttcttgcggcgttttttaccattgcggctttcatccctagcctttttggcagcttcacgcgcatcgcgagctttttgagcctttttaactaaagtttgggcaaattcaccattttctagcaaataatagctcatcttctcataaactagtgcatcaacagcacttctagcttgaggtgtacctaacttgcccttggtctggccttcaaattcaagtaattcttcaggaaccttaattgaaagaacagcacttaaaccttcacgatagtcactaccttcgatattcttctctttttcttttaataacccctgcttttttgcatagtcattaaatgctcgcgtaaagcctgaacgggcgcccatttcatgagaaccaccatcaatcgttcgaacattatttacaaaagagacaaagttttcggaatagccgtcattatattggccagaaaattcaatttcaattgaatcttgcttgccttcaaaataaaagacatctccaaaagtatcttttccttcattcaggtatgaaacaaaggacttaatcccatcagtataaagaaattcttcatagtgatttggtgtccgttcatcttttaaggtgaacttaacgcccttaagcaagaaagcagactcacgaatccgttcttcgatggtttcgtatttatacttcgtagttgaaaatactcgttcatctggcttaaaagtaattgttgttcctgttttatcgttagtcttacctaagtgcttcaaagttccaattggcttaccaccatcgtggaattcttcttcataagcttgtccgccacgcactactcgcacttttaaatatgaagacaaggcattaacaacacttgaaccaaccccgtgtaaaccaccagatgtcttatagttcttttcagtaaacttcccaccagcgtgtaaaacagtaaagataacttcaatagttggaattcctgattcatgcatccctgtaggcatcccacgaccaaagtcttgcacagtcacactgttatcttcatgaatagttacgttaatttctttaccgtaaccagccattgcttcatcgacactgttatcgacaatttcataaactaattggttaatacccttgatgtcagtagaaccaatatacatcccaggtcttttacgaactgcttctagtccgtgcaaaatctggattgaggaatcatcataactatttgcttttgccaagctttttccctccaataaattttttctgccacactattataatctttgttacaataacacatagactttaagtgaggtttgaaaatgttaacaattaaaattgcgctattacttattttagcatatctcttgggttcattccctactggtgtgatagttggtaaagttttttttcataaagatattcgaaaacttggttctggtaacccgggctctactaataccttcagaacttttgggccagttgcggggatgagcgttttgctagtcgatgttttaaaaggaaccttagctacacttttaccggtaatctttcaccttgggccacatcctttaggaataatttttgggatgctagctattttaggacacaccttttcaattcttctgggctttaagggtggtaaagctgtagcaactacagctggctttatcttgggatataacctagcattcttctgcgtttgcgctggaattttctttccaatgctctttatcactagtattatgtctttgacagccatgctttgcatcactttattttttatctttagctttttattccatgatccatacttaagtgccatgatgtttgtgttattaattttgatttttattcgtcacaaggccaacattgttcgcttaaaaaatggaactgaaaatattattccctttgggatttattactggctgaaaaataaataattacatgataaaagcgactctagcaagagtcgcttttatattatccttttaattttaatattttacttactcatgcaaagcaatggtaattttaccagtccattcttcattaggagctaacttaataataccccgctttttactaatatcgccatcagcatttatatcatcgcaaagtccccaccaaggttcaatgcagacatagttagctgttttaggatattgtgaccaaactccaataaatgggctattttcggttgtgacattgatatgatagctagttttttcactacgtaaagatagcttagttgcttctttaagttcaaaaactaaagcatcatctttaaacaattcatcattcaattcaattggagtgtctgttgctgcaattgttctttttgcccaatcatgtaaacccgtttctttgctaataggaatacgaatatgatccttggaaggaaacatttgtaaataataattgttcttttttagttggtcattaactggaatattaaacccaggatgacaaccaattgagaagtacatttcttcattagaaggattcttaacactcaagtcttcaattaacaaattattaagtaagcgataagtaattaccaattcaaaatgaaatggatattcttttaaactagcctcatcatcacgcaaaactaaactaattgcatcattttcttgacttaacaacttaaattccttatctctagcaaagccatgttgactaagttgatagcttttgccttgatattgataagtatcattttttaagcgaccaacaattggaaacaaaattggtgcatgacgattccaaacttctggatcagcttgccataagaattcagtatctgaattgacactttttactgaagctagttcagctccacggctatttatttttacatttaaaaattgatttttaatttcgtattccatcttaagaagtcctttatagaataaatttagttaaatccttattcataattatatcactaagtttttcttctacgtaagcttgagtgatagttatttcgcccatttccatatctggaccctcataaagaacatcttcaagtagcttttctaaaatagtagctaatctccgcgctccaatattgtcagttccttggttaacgtcgtacgcaatttctgcaattttatcaattgcttcttgagtaaagattagcttaactccatcagcttcaagaagcgcaatatactgcttaagtaatgaattttctggatcttttaagattgatacaaaatcagctttagttaaagcattgagctctactcttattgggaaccgtccttgaagttctggaattaaatcactaggtttactttctgcaaaggcaccagctgcaataaaaagaatgtggtctgttgatactggcccatatttagtttgaacagttgagccttcaacaattggtaaaatatctcgttgcacaccttcacgtgacacttgaccagcttctttactcttaccagtaatcttgtcaatttcatcaatgaagataataccgttttggcttgtgcgttcgatagccttttgataaatggtatcgtagtctaccatcttacgagattgttcttggatcaatacttctcgtgcatcacgaacagcaagggtacgcttaaccttcttcttaggcatcatatcacctaaaagtgagttcatatccatccccatttgccccatcatatcactcattgggttaactttaggagcttgttctacttcaatcgtaacttgacgatcttcaagtagccccttattaagttgttcagcaacacttaagcgttgatttctgatatcatctgtaacttcttcttgtggttgctgagcttgctgagaacccattaacatctgcatcatttgttgcatttgattttcacggttttcgtgtttaatgccaggtacaagcaaacgaaccaaagttttatttgcttctttagttgcatcagccttaactcgcttgaactgctctttttcttccatacgaacagcttcagtcactaagtcacgaaccatcgattcaacatcacggccaacataacccacttcagtaaacttagttgcttctactttaataaatggtgcatcaacaattttagcaagacggcgcgcaatttcagtcttaccaacaccagttggtccagccattaacatgtttttaggagtaatgtcttgttgcaaactctttggtagttgcaagcggcgatagcgattatacaaggcaatcgctactgctcgtttagcttcatcttggccaataatatattcatttaataaacgtactatttcttttggagttttaatagacatctaatcacctatttcatcagtaataatttcatggtcagtaaagacatcaatatccgcagcaatccccactgcttctttagcaatttcactggcatccatttctttagcatggcgggtcattgcgacggccgctgcttgtgcaaagtaaccaccagatccaattgcgactacgttttcatctggttctaaaacttcgccgttaccagatatcaatagtaagtctttttcattaaaggcaattaacatcgcttgtaatttttgcaaagtaggatctttgcgccaagattgagccatttctactgctgcccggcgtaaatcacctgaataactttcaagttttccttcaagcatttcttctaagctaactgcatcagctacaccaccagcaaaaccgattacaacttggttgttataaattctgcgaattttctttgctgatttttttgaaatatacttttcacctaaggtaacttggccgtcaccagcaatggcggtcttaccattatgttttacactaacaattgttgtcataactaatccttccctttattacgtggaaaaaacttttcatagtctttttgaagacgttccatcgtcacatgagtataaatttgagtagttgataaagattcatgacctagtaattcttgaacactgcgcaagtcagcgccattatttagcatttgcgtagcaaaagtgtgccgtaattcatggggatgaacatttgcgctaagtccacctttttggaaaactttgcgcataatatattcaattcctcggctagttaactgatgcccccgattatctaaaaagacataatgattatcatcatctggattaaacaatcttcttgcttcattgagataacgcaaaagacaggcctttgcataatcaccaaatggaacatagcgatctttatttcctttaccatgaactaaaatcatctgaacatcaaaatcaatctgttccaaggttaaattactaacttcactaacacgcatccctgtcgcataaaacaattcaaacattgctttatttcgaacagttaatttatcagaagctgatagagaatctaaaactttttttatctcaggttcatagaaaaactctggtaattttttacttttgcgatgaatacttacagtttgggtcggatcaacctcaaccaaatttcgtcgcgttaaaaacttataaaaagatttcaaagacgacagttttcgcgcttgactagcttgtgacaagccggtactagcaagagaagctatgtaaatttcaatatctctactagtaacttgcttaaagccgttaaaaccaccattatttttccaaaaatcttcagcttgctttaaatcattcaaataagctgtcaaagttaggttagaataacctcgctcataggctaaataatctttaaattgctcaaggagtgactttttagtcattaatcttcatttcttccgcaaattctgctaatttttctaaaccacgttcagaaatcatttgtttacgctcacgcttattgcgaattttcttttcaagtggtggaatcaaactaaagctggcgttcattggttggaaatgcttagaactagttgttgtaatgtaatttgccattgagccaagtgccgtttcaacagggaaagtcactaagtcttttccttgtgccaaacggctggcattaattccggcaactaaaccactaccagcactttcaacataaccttcaaccccagtcatttgacctgcaaaaaacagtcctgcctgctttttagcttcataagttgcatttaaaacatccggtgaagccatataagtatttctgtgcatcttaccataacgaacaaagcgagcattttctaggcctggaatcattgaaaagacacgcttttgttcaccatatttaaggtgagtttgaaaaccaaccaaattgtacattgaagaagccgcattatcttgacgtaattgcacaactgcatatggagtcttaccagttttagggtcttcaagtccaacaggcttgagcggaccaaagagcatagtcttttcacctcgagctgccataacttcaattggcatacaaccttcaaagacctcatctttttcaaagccgtgaagttccgcagtttcagccttaactaattctttccagaatttagtaaattgctctttatccattgggcagtttaaatatgcggcttctccgcgatcgtaacgagacttcttataaacaatatccatatcaattgaatcactagcaacaattggagctgctgcatcaaagaagtgtaagctatctgttccagaaaagtctttgatttgcttagctaaatcgtcactcgtcaaaggaccagtggcaataatggtaattccttcacttggaattttagtaatttcttcatgatgaatatgtaagttatcaaacttggctaattcttcagtaatatatttactaaataattcacggtccactgctaaagcgccaccagctggcaccttagtggcatcagctgctcgtaaaacaagtgaatctagccggcgcatttcttcttttaaaagaccaactgcattagtcaattgatcacttctcattgagttggtgcagactaactccgctaaatttcctgtttcgtgagcaggcgtcattttaactgggcgcatttcatagaggtgaacttcaacccctctttttgctagttggtaactagcttcactaccagctagtccaccaccaattacagtaactttttgcgtcatttatttcatccttatcctaattaatattgataaaaaaataatatcatcaattaataatctttctgatgatattatctcacaatgtcaaagatttaacttttatttagaactttcgttttcttcacgttcttctttatagtcaccatttggacattgtacaacaggtcctttcttagttttcttttctactaagaaatggccatcatttggacaatcacggcctactggcttatcccatgaaacaaagtcacaatcaggataattactacatccaaagaatttacgtccacgtttagattttttctctacaatttggcccttgccacatttaggacaaattacaccaatctctttgacgattgccttagtatttcgacaatctgggaagcgtgaacaagcataaaacttgccataacgtcccattttaataaccattggtgccccgcaaatatcacagttaaagccagctggttcatctttgatttgaactttttcaatttcactatcagctttttcaagttctttagaaaatggcttatagtattcatcaacaaccttaacccagtttttctttccctcttcaacatggtcaagatcattttcaagttgagctgtaaagtcaacgttaacaatatctgggaaaaacttgccaactaaattatttacaatttcacccaattcagttggtacaattgctcttccttcaagcttaacataataacgtctttgaattgtatcaattgttggtgcatacgttgacggccgtccaacaccattttcttcaagtgcacgaactagacttgcttcagtataacgagcaggaggcatagtaaagtgttgcttattgtcttgcttagaaagtttaacactatcaccttctgcaaggtctggcaattccacactcttatcacttccggcatcataaaccttagtaaatccagcaaatttcatcttagaaccagttgtacgatacataactccattttgaacgatatcagcacgaactgtatcaaaaacagctggagtcatttcactagctgcaaatcttgaccaaattaacttataaagtttgtattgctcactagttagactgttcttaagtgattcaggagttcgatagatacttgttggacgaattgcttcgtgggcatcttgagcatcttcctgatttttgaagtgacgagcactttttgaagcatattcagatccaaatgtttctgttaaaaacttacttgcctctgcttgagctactggtgaagttcgtttggaatcggtacgcatataagtaattaacccaactgtaccttctttacccaagcttataccttcataaaggccctgagcaattgacattgtccttctggttctaaaccctaaacgcttgttagcttcttgttgcaaagtagaagtagtaaatggagctggcgcttgacgtttacgttccttttttactacattttcaactgtaaaaggcttctttttatcaatcttctttaaaactgattgcactgcctcattattaggaagctctacctccttgccatctaggccgtaaaaactagcctggaacttctttttacccttaataaattctgcatcaatagtccagtattcttcaggtttaaaatctttaatttcttgttctcgatctaaaacaagctttaaggcaacagactgaacacgtccagcagataagccttttttcaccttagcccataaaatcggacttaaagaataacctacaagtcgatccaagaccctacgtgcctgctgtgcatcaacagtatccatatcaattgttcttggatttttaaaggcgttttttactgcatccttagtaacttcgtgaaaagtaacacgatgcttttgaccgtcattcaaatctaaaatatgagcaacgtgccaagcaattgcttccccttcacggtcggggtcggatgctaaatatacaaattttgcttttttagcttctttttttaattctttaatagtttcgcctttaccacgaatggaaatgtatttaggttgataatcatgttcaatatcaacccccatttgtgacttaggtaaatctctaatatgtcctttagacgcaattacatggtaagaacgtccaagatatttttcaattgtcttcgcctttgcaggagattcgacaataactaaatttttctttctagtaggcatcaaatgcccctttcttagtctgtaaaaatcatgcttaagaataaagtagctttttcagattgtcaaataaaatgttgtttcaatatctagcttaatatatggtagaaaaaaatcaactattattaagctattaaaaataataatttatttacatttatcaaatcaatgtatattatcataaaaagtttcaagatctaagagtggacaagcaccagctttgattaattcattagggccttgcgataagggagaaaagactgatcccggtaaggcaaaaatattgcgattctcatatagtgcataattagcggtaattaatgaacctgacttgcttttagcctcagtgacaatcacattatcacttaaacccgccaaaattcgattgcgttctggaaaacgaaaaggtcgcggtggtgtatctggcaaatattcacttatcaataagccattttttataatctcaaattgtaaatttcgattttcttccggataaaagtgatttaagccattaccaactacggctatcgttttcccatgatgtcgcaaagctgcctcatgagctaaacggtcagctcctttggcgagtcctgatgcaattacaaaatcttggcttaagcgaggcatccataaatctaaagcttgttgagtataattagttgcttgtcttgcaccaacaatcgtggtaattggccttttcaaaagagaaatatctcctttggcaaataaaagtagtggtggcttaaaaatctgacgtaatttatctggatattcattatcaaaaaaactgataatctgacactgtttagttaacaaacttattgtttggggatgcttgggattagagtaagctttaattgctagatttttaatttcttcaggtaatttttctaaatcagctagtgttacttcagataaactgaggagttttgtcaaaatcgctagtgacttttgatagccaatccctctttcaagctttaatcttaataaaaattctttaattgtcattctcaattccttcttccaagtatatatactcaaaaaaagtttatttttactaaaaaagtctagtttaataactagacttctgaattaaattttattttgctaatgaaaactgaagcaacgacaattacaatccctaaagctactaataaccactgggtcaacttagacccggctttttcaaatgctaaatattgccgattatttttatctttaggtactctttcacgattggaattagtaaataaactcgttgatttgttattatcatttaaataagtgttgggcaaattattgttagctttagattgttcaatattatttgtattagggatatcaggtctttttataagattttctttctttttttcattatttgttttacctgattttccagatttattcttcaaataaatcttaactgtttgattggaagctcccgtaaatgtataagagcttgggattatattattatcaattgtatatttactcttatccggattagtaatatttaaagaaatctcctctccggattttccagaataactatcttcagacaaaatctgattagtggttttatcaatatactcaactgagagtgtatgttcatcaggatagtaaataacataatagtttcgatccaaattagtattatcaagactagttaaagtgatttccgattttgaaatagttccatcagttaagctttcttctttttgtccattttcatctaccaaatatgcagtatacccctcttttttagggattgtataactaggccactcagaactaacttctttatcaagagtaacttttctttggttattttcaaatgaaactttttcatcataagttagatttgctctatcttgatgaaccaattgaaaatcttcatcaccatcgactttggcataaatctttctattcgctgtaagcgtttgattttttatactttcagttgaatctgttgtttctgcaagaactactgttgaattaaaaaacaataagaaaacagatgtagcagcaacttgcgctgcttttttaaagaaaataataaacctctcctacttgtagtctatacaattcataatactatatttataaaatattacaaataaatcaactcaaaagaaaaacggcactcatttctgaatgtcgcttctggggtattaaaagcaattaatttcgtttctttatagaaaggaggagaacctatctagggattcaataggctctgaataaaggataaataacgtatggattcgataagtaaattacgtttatacctaaaggcgaatcgattaattgctttcagcaatattatatcatctttttttaaataatattattatataaaaccaaaaattatcattattaatattattctaattcaaattgaaagcttttacatctttactataaagcaaatctgaatctgagcttttgttctatccttgatttgtcaactccatattaattataatgatataaaataattaatggaggtatgcaatgttaattcaaacaactacagatattacatcagctctttatcaaaaaattttaagcttgcgaaaagaagtctttgttaaagaacaaaatgtaccagccaacttggaacttgaaaatgaacaagggcctatttactatggaggtgtaattgatgatactgttgtttgttgcgcacgagttatagaagaagataataaaacttggcatatccaaagagtcgctactaaaaagcccttccgtggtcaaggacttaattcccaactatttaagaaaattgaacaagatgcgaaaaataatgggattgaccgcttaatccttggagcccaagatcaggcccaaggattttacctccatctcggttttaaggttgttggtgatgcatttattgatgctggtattactcatcatatgatggaaaagaaaatataatttgacataatttttaagaagtaaaaagggctctttgtcaaatcctgttgataaagagtgatttaaagaatcaagcaatatataaattgcttggttctttttctttaactttgttttcttctaatctaattcttgttagtaagttaatgtaatttgagtaaccataagcagtacgctcaatctgtttaatcttacgattgaaaccttctaaacaaccattagagtagctgaatctagcaccatttaagactgctcgtaagttatgcttaaaggtcaataaagtcttgtgcatcaaagtgccaacctcagctttagaattaattatttctttcaaagaattagtatctctagctttaagagcagccataaagtcttgcattaaattatacgcattatctagccttggatcacaactaataccttccattacaacttgttcttgagttagatagtctttgaagtgccaattataatgagggtgaatcttatctaaatcaacgaaagacttaagataaagcttccaaggtgatttgagcagttgatattgccttgctcgtttatcaaaagacttcatgactaaaactcttaaagaattaaaagagcgagttaacatctgtaccatatgaaaacgatcaatgataatttctgcattagggaaacaagctctaacaatattttgatagtaaaagtttaagtccatagaaacagttttgacgttagcacgagcactaggagagaatttatcaaagtatttaagtaaagactttttgtatcggtttctgaggatttgaaccacttcatgcttttgaccatcaagacaaataaagtgtagctttttatcgacgcctttaaattcatcaaaggctaagtgttcaggtaaatagttatagttatcaataaaacgatgagaacaagaagctaaaacgcgttgaacagtattaacagatagattattctcacgagcaatactagtcatagaacggtcctcagttaaagcagaaagaacctttcttttggcaggattagagatagaacaatatttattaactaacttagatttggccattgaacgagtattacaatctcggcagagaactctttgcttatttaacctgatgatcacaggactactagcattagaagtaataaatctaatattagtctgaagatgaccattatgaatcagattaacagaaccgcaaaaaggacaagcaggctgaataagagtagcttgaaagaccttatacttaataccgttaattaatttaaagaaatgagcattaaaagtgatattagggtcttggatatcgagtgaaaatttaatacaatcattgtaagaggacatagaaaaaccttcaatctattaaaatttgagtcgtgttgaattttattgtaagtagaggggctatggcctttttttttgcaataaaaaacctgttaacagtttaactcaaataaactatcaacaggaaaaattatagaaccgtaaaaagggagccgttggctcctttttttatttattaaagtcatactcactaacaggtgaaaaactgcgcctatgaattggggttgcaccgaattctttaagtgcggctagatgtttagcagttccataaccagcattatgttcaaaatcatattgcggataaactttagcataatcattcattagttcatccctaaatacttttgcaactatcgatgctgccgcaattgaattggacttactatcgcctttaattaattcaatctgcttaatatcaactgggacattcatcgcatctaccagtaataaatcaggtctaagagccaaattatttactgcttgagccattgcaacacgatcagcttcataaatgttaattttatcaattaattctgggcttcctacgccaattccgacagctactgctttatccaaaattcgaggataaagttcaagtctttttttagggcttaatttttttgaatcattaacttcaactaagtcaaagctatcatccaaaacaactgcagctgttaccacggggcctgctagcggcccacgtccgacttcatcaacgccagctacaatcgaaccggcagcccaggctttttgctcgtactggaaccgattcataaaggctgccttagctttagcaagcttagctagacgtttattatagctttcaagaagtttttgaacacctttgcgttcatctttttgcaaaagagcaagtgtttcagaatcaacttcaccttgcaaaatctcttttatttctttaatactcatgcttcaactttttctaaattaattctacctagtcgtcccttacgtaactgattaagcaagaataagctcatcttttcatagtcatcacgcatgccatatttttctgtcatagcgagtaatagttcaggaagtggtaaatcagttacttcttgttcagttaatcgactaaattttactagactcttaaagtaattttctttcaagtattccattacaaataatgcaacatcatccgcatgaaaaacactctctttaattgaaccaagtgctgctagtctaaagccaacagcttgatcttcaaatttaggccacagaatacccggtgtatcaaggatttggacactttcgcttgttttaagccagctttgccccttagttacacctggacggtcaccaacaattgcaacatttctaccaactaagcgattaatgattgttgatttaccacagttaggaattccaactaagcaaattctaattgtaggattgctggctcctttagcttcaagtttatcaattcgctctttagctgctaatttaatcaacttaaacaatggcgtcatattcgtattatgttgcgcatctaacttaagaacgaattttccatcactttttagcttggcttcccatttattaatttcattagggtctgctaaatctgctttatttaagataataatatggggcttatcccctactatgtcactaattaaaggatttcttgatgaagcaggaattcttgcatcaactacttctacaatcacatcaagtaaacttaacttatcttctaattgaacccgtgccttgttcatgtggccaggataccattgaattgccatgtaaaaatcctttcatttttataattctgtacctgaaaaaggcgtcaatatttataataccatgatttatagttgattcgcattcaaaacttttttaataaaaaaagcactctctggtgcttaatcttctttcgtgcctaaaaataaaatttcagccatcaaggtctcacgatatagttttaaaaatccttcacgatatttttgctcactctgggcaatctgtcctaaataattgcgctctagtcgaaaggcatagcgataaacttcatctcgaaattctcgatcatgtggcttcaaatctggtcgcctcacagtcgtattcatttctttcaagaaatccttcattgatacttcatctaattgtgcctttaaatcatataatagctgtctacgcaaagcctcaggtaaataaattttatcaagttcaagcatagcatattcaaccatgtcttttctaactttacgcatttctttaatttgatcaagatcagccactttctttggtaataaaaatctaaagacaattgttggaacaaccatacttaaaataatcaatgtcgaacttgctaataaggcaaaatgaatgtcagatagcttaattgtttcttcagttaaagtataagctagtgcaaaagtaacagcaccatgaactccacctaaactaaaagtccaagccttcttctgattatgcctaaattcagtcaaaaaggtgtaaagatagcgaatcaaaatattaattacatataatagtataccaactaaaattgccataatcgtttgagagttgaaaatatcttcttctaaaagtctaactaagactaatcccaaaatcacaaagacagagccattcaaaacatctgtaaaaatattacttaattgattaccaacaaaaaccatttgtggatttgttaatttacttctctggtgttctgcattatggactaaccccgcaacaacaactgtaattacacctgatacatggatttcttcagctaaaaaatataataaaaatggtgtcattaaataagcgatttgcactggggtattcaaagaaaaactactatcttctaagctactagattgcattgttctttgtctaatcattgctaaaagtaaagaacttataattcctaaagcaattccacctataactgcaataaaaagttggcttatcgacttgataattaccagatttttattaacgtaccaactaaccatcatcgctagtaaaactagtcctgatgcatcattaaacaaagactcatttctaagataatacactacttttcttggaacctttaatccatgcgttacactttctcctgctgttgcatcagttggggtcgcaatggcagctaataaaaagcaaaaagccatattcatgccggttaaataatataaactaaatccagcaactaattcaattattacaatcatgaccacagttaagccaacaattgacttccaaaaccttttaacatagtaaagctgtgtattttgaccttcaaaaaacaacagtggtgcaacaattagttccataaaaacttcagattgaaaatcttctactaggttatttaataaaggcaccaaccctagtatcattccaaaaaacagagcaacataattgacggatattttatggaagtaagctttttgaaaaaccattgctaaattagtagtaaacaaaattactaaagttgagattaaaatatccacgtatcatcaccttctaaaacaaaaagccaggaaaaaatcctggctcttacatattatctttatacaattcatatgctcgatcaaaaattgtcatacttggtaaatatgaagcatttaattccaaataatcagacaacttttcataatcctgttcctgcttagggaattgttgatcatgttgcgcattattggcaaattcagcaatttcatcatgtgaatcaggatttctttgagtcattaagaatcgataaaaactttcacgataagccatattagctcctttttatttaacattctatattcacttaatactactataagtatagtttgatatcaaaaaaactgcagattacccaagtaactgcagctatatttaacttattctgaataaaacattactgcataagctccatgccctgcatgagtgatgataattgggctagtttcttgaactaaaatatccatattgggattaacttttttaagttcattagctaaatcttccatatcatctggtgtatcaacataagaaataccaagatgcttaatattaggagtattctttacctgctcaattaagtcttgattaaatttcttagtgaatttcttaccgcgacccttagccttgatatttaagacattagtagtcatttcaaggaaaagtctaatattaagtaaggtagcaactcgtccagccaatgccccaagacgtccacctttaataatattagttaaatcaggtaccatcatttccagatgcatttgttcttgcatttgcttgagacgcgcaattatttcatcaagatttttatcagcttgagccatttttgcagcttctaaaacttcaaaccccattgcacggtctgtataaccagaatcaaaaattgtgacatcaaaatccactaattcgcttgcttgacgagctgcatcaactgtaccactcaagcatttagccataaaaatccccagaacttgacttccatctgctgcaagcttcttaaattcatctacaaaacgtccaattgctggttgacttgtcttaggtaattccttggcattatccattttttggataaagtcttttctagtaatatcttctccatcaacatacgtcttgtcatcaatcgtaattgaaagtggtacaactgtaataccatacttttcaatttcttctggacttaattgtactgatgaatcagtaataactttaatatttggcaaaaccttcgccttcccatccttttggctttaacatatcttatattttctttggtatactataatgtaagaaatacaggtaagcatatgtttactacaagtatatcaaaaattctttgatatagtaataatgaatgaaaaggactaagaatgaatttcaaaaaaatttggcaaaagcctaaacatcaaccaaaagtacttccacttttagataatatcttttctgcagtaacccatggaattggatttgggttagcagttactgcacttgtactattaattattcgagcagtaggaactcattcacctttgcgagttgttacctttacaatttatgggtcaagtttgatttttttatatttattttcaacgctctaccattctttaatttataccagagctaaaagagtatttcagatttttgatcattcttcaatctttctttcaattgcgggatgttatactccttattctttaatcgcaattggcggggttaaggggtggataatttttagtataatttgggcaatcactatttttggaattttgtattatattttaactaaaaagagaaatagtatcattgaagtccttatgtatattagcatgggctggctagtaattttttcagcaccccacttatatcattatcttggaacaactggcttttggttattagtggctggaggaattagctatactgttggaacactattttattccatgattggggtaccgatgatgcacactgtgtggcatttattcgttttagctggctcaattttgatgttcttttctattttgctttatgtttaataagctaaaagctggtaaatatcattttttaatgatagctaccagcttttttgattaatattttttatcttcatcttcaaagacaagttcttgatacaaaccttcttttactggaatcatattattaatgtttaagactccaaaaaaagattgccaaaaaggcaacccttctctcttttgattctcattcagagctgagatacactcctctttacatattcgttctactaaatctcataaaatatagccaataatattaatcatctattctacaataaaattcttaatagcttcttcgtcattagctatcttaccatcaacaacagcttcagtaattttagccagcatatctcctaaactaggtcctggcttaattccccattcaattaaagttgagccatcaaccacgagttctttatgattcttaataggtaaagccacatagcgatcaactaatgcttcactattaacaggttggcccaaaatccgagctacatcacaggcagacataactgtatcttgtcctgcgaggaataattcataatcacttggactgtggtcagataataaatcaaagaaaaatacaatttcttccactttacgagtcatttgattagaattcttccaatctctcataaacttcggaatttgttcatttggtaactttaacaaaatagcaataattgcccaaacgcttgcctcagttgatggagaaaaagtcaagctagggaaaactgacaattgctctttttttccgcgaaaatcaggtacttcttcacttaattgagtatccaaaaacacctgaaatacacttctagcatgtggccctacgcacatcttaacgaattcttcgcgaatacgttctacagaaatcttgcttaataattcatgatggtcacaaattgcttgtctagtattctcttctaaagagaacttcaactggctcatgaatcgaactgcacgcatcattcttaaagcatcttcattaaaacgtctttcagggttaccaacagccttaatcaagccattttttagatcatctaaaccattaaacaagtcatgaatattgccatattcatccattgccaaggcattgatagtaaagtcacgtcgctttaaatcctcttccagattttgaacgaattccacatgatcaggacgtcgataatcctgatagcctgactctgttctaaaagttgtaatttcataactatcatcatcgtataaaacagttacagtcccgtgttgaattccagtatcaatacttctttcaaaaagttgttttacttcttctggatatgcactagttgcaatatcaacatcatgaatatgccgattcagtaacaagtcgcggacactgccacctacgaagtaggcctcataaccagcttttgttaaagtttgcacaactggcaaagcttttataaatatttcaggtaaagaattaattttcatattttaaaatcatcatttctcattttaattttgttatctaagtttgttaaaataaaaagtgcaatacactagggaggatatcttaatgaaagtaattaaaccaaaatttccaatcacacccagctttatcattgaattaatcatgattgcacttggatccgccatatatggcctaagcattaatatgattagtatccccaatcagttaacggatggtggtttaagtggtatctccctactactattccattggtggaaagtaaatttaggattcagcactattattttaaacatccctttaattttaattggttttcgctttttaggcaaaaaactaatgattgaaacactttggggaactatctgcttagcctttttcttaaacttttggcgtctaatacctattataaaccaattgaatttagagcacgacctcttattagcagcaatttcagctggattactttctggtttaggattagggattgtcttccgctataatggtacaactggtggctcagacataatcgctcgtattctgcagcaagaaaaagatattaaaagtggtaaaacttttttcataattgatgtaattgtacttgtactttcactttcatacattgatattcgccatattatgtacactttaatagctagttacattgctactacattaattgatatcgtgcaacaaggcggtaacaaggcaaaagcagtctttattatatccgataaatatgaagaaattgcgaagatgattgatttagagttagatcgtggcttcagctttttaaacggcgaaggtggtttcgaccgtagccaaaaacatattatctactgcattgtagccaactatgaaattcaagctgttaaggcgattgttttaagagaagatcctaaagcatttatgacaatttttgatgctaatgaagctttaggagaaggaatgagctataatcgaaagaagcgcaacttttttatcaggcgataaaattagaaaaacaaataaagaggatgttaaaaaacaccctcttttatttttataaactttttccatagacatatattccaaaagaaaaagtattttgctattattctagattttggtataaagctaataccaagatttagtaactttagcggctacacacccctcatacaactttgaagttacggaggtgagagccatgctaaattggatagactggagttgcaaagctagttgattttagcttatgctatcgcaataagccttgtcttaaatgcctgtggcatctttgccattcgtttagcaatcgcttatgtgataacaaaaaaagctaatcataaagattagctaaacacacagtcgttcaaagttacgattgaagtcaacgaggtaagagctcgttggcctcttttcatttacaaattatacactaaaaagtttgctactccaactatttttagtcgattatgtcttacgtattcttattcactgcttgttatattatttcataattataactcaagagatactaactggctttttatacattacagttagctattttttaaatactttagataattatattcttgcataaacatatgcttaatacgatttctgactaagaagatatttattgtaaaagcaatcctttattgttgaaaatattatgaataatgtatttatgattaataaaggccatgataatttatggtcacttaatatttcatatccagaaagatggagaccgtaaaatagtttgtgtaaggatgaattattccttaatttaatttcctaaaacattagaaaaaggagttcctttctcgtatgattggtttgaacaaaaaaaacatacagaaagaagaactccttcatgaatgattttaccaaaaatataactcaagctctattcaatcaagataaaattaatgatttgcttcgtcatgaaatccaacaagctgttaatgacatgttagaatctgaactgactgcctttttaggatatgatccctatgctagaaatggctggaatactggtaattctagaaatggtgcgtatttccgtaaaattgatacccagtttggatcaattgaggtacaagtgccacgagatcgcaatggtatgtttcatcaacacactctgccagactataaacaacatactgatctcttagaagatatggttataaagctttattctaaaggtgtaaccactagagaaatagctaatttgatcgaaaaaatgtatggcagtcattatagtccagctcaagtgtctaatatctctaagcaaatgattcctaaagttgaggcttatcacaagcgtaagctgagcgataagttcttttgtgtttatcttgatacaacgtatataccgttgcgtcgagaaacttttgaacgagaagcagtatatattgccattggcatcaagcctaatggtcacaaggaagttatcgactactacattgcgcctagtgagaatattgaagtctggacggcgttgctccagaacatgaaatctcgtggtttaaagcaagtagagcttttcctttcagatggcgttgtcggcatgaaagcagcactggcaaagacctatcctcaagctcatttccaacgctgcttggtccatgttatgcgcaacatctgcgctaaagtacgcgtggacgatcgcgaggcaatcatgaacgaattcaagcagattcaccagcaagccaataaagcggctgctgttgatgtattgcatgctttttatgccaaatggaacaagagctacaatcgtgtcattagaaacctgaaagacatcgagccagacctgcttgttttttataattatcctaagcagatcagggcttcaatttactctaccaacatgatcgaatcctttaataacgtcattaagcgcaaggctaagcctaaagcggagttcccgactgaacagtcgcttgatacttttattggcatccaagcaatgagctacaatgaccgctacttcaaccgaattcacaaaggctttggtcaagtccaggataccttagaatcctattttgaataaataaaacgttaaaaaaacaatttacgagaaagatctatttacacaaaaaatttgacagtttcgaaagatgtaatatactaaaaataataaaccaataaaaatgtagatatctcattatgaaaaaataaattggaaaacctacaaaatgattcattttgcaaatctgacattaaaatacttcctttccaaaatccaatagtatatttaaagaatagcaatcttttaaggaaaacatgtctttcatccatcatcggcaaaaatggcacaaaaatagggaaagtcattatcgactttccctatttttaaacagctaccaaattctagattaacgcatcaattacattaataatcattccattatgtcttacttgtttgatacctacgccaaatggtaaactatcaacttctaattcttcttttgtaccagaacgtaatgattcacggtgttgccatgatggaccatctctataaatgaatgcatcaaatgctgcatctacaaactccttaggggtcattccggatgctgaaccttgcataccttgaacttcagtaactactggaactttagagtttttaaattcaggttgatttaagaatggtactccatttggcatatggtcatcaatatctccggttttttcaatagattcaatattttgttgggctctaaattcagctaaactttgtttttcagaattaataacaaatggcactgtattcccctgttttgcattccattcatttactaattgtaaaaaatattgttctgcttcttgacgttctgaatcagtccaaattccattattgcttgtaaaaccagaattttctgatgatgacccactttgacttgcagaagcacttgaagcactgcttgaacttgccttacttgattgtgagcttactgcactacttgcgctgcttgaacttgccttgcttgattgtgagcttgctgcactacttgcactgcttgaacttgccctgcttgattgtgagcttgctgcactacttgcactgcttgaacttgccttgcttgattgtgagcttactgcactacttgcgctacttgagcttgccttgcttgattgtgagcttgctgcactacttacgctacttgaacttgccttgcttgattgtgagcttgctgcactacttgcgctgcttgaacttgccttacttgattgtgagcttgctgcactacttacgctgcttgagcttgccttgcttgattgtgagcttgctgcactacttgcgctacttgaacttgctttgcttgattgtgagcttgttgcactacttgaagccttaacgggtctattagtgtagcgtgatggaatccattggtctcctcctaagttgtaccaaatataaccatcatcacctactgctgtcttatatactctccatgatgagttatgtgctaatcttctaccagtccattctttacttgctggtgttttccataagttaatgccgtaacctggaacatatttaattgtcactacatttgaatcactagcagcagctttaataggtttattagtataacgtgatggaatccattgatcccctcctaagttataccaaacataaccatcatcacctactgctgtaccaaacactttccatgaagaattatgaggtaatcttctaccagtccattctttacttgcgggtgtcttccataagttaatgccgtaacctggaacgtatttaattgttacagcattaacgttttgttttctagaagatccatcgtcccaattagtgtattgagcaggaatccattgcttttgtgtaccaattctgtacatagtttgatcattgattgtagctttttcccaaactttgaatgcagaattgttataaacatatttatcttgaaaatggccgttattgtctaataaattgaccccacctaagccattgtatttaactctaagaactccacgaacttgttgattattagttgcagcttctactttttgatttgtattatttgatccaataacaccagctaaaattgctgcccccattgccgaggctactaatttagcagcttctttgttattcattgatatttcctccaaaataaataaactgtctataaatccctattttacccccccaatatttttttcaagtataaatttaaaatcgttctaaaattatttttaagtaaaaagggaggataactatatagttaccttcccttttatattttataggtgattttaaacaaattatttttataaaaatctctaattctttttcagttcatcatatgtcataacaactatgactgggccccacggcaatacgattgacttgtcttcatcacttctgggtctaaatacatacttactccgaccttggttaaatggatcatttttactcaaaaagataatataggtctttttcaaatccattggaattccgccattatcaataatctctgcgtctaatccagctaaatattctctactttttcttcccaaatcactacaattctcagtactgattataactgtagtttcattcccattactttctagaatagaatatgtggtaacttcatcacccaactcaaactctaatctattaacatcctttacttcaacatcagataaagcttttttaataatatctttgccaaactcaagtttttttatttctttgcttaagctatcaaaattatgattcattttctcctccactatgcatatagtaatacgactatttttacatctttttaccaattaagtttactagcctttttgcaattccttttttagtcatttccggccaactaacgggttcaaggcctttttgtaagatgtaaacttgatttttatcactcccaaaaacaccagaacttacatcattagctacaatcatatcagcatgcttgcgttctagctttgcttgggcattaaccaataaattctcagtttctgcagcaaagcctactacaatttgctgatccttccgtttccccatcgttttcaagatatctggagtttgcgtcagttcaagtaccaaatctgtttgaccaggttttttcttaattttttgattaatactatttttaagcttaaagtcagctggagcggccgccattaccaaacaatcactagcagaaaataacttttcaacttgggcaagcatatcttcagttgaggtcacttgataaaccttgattaactcattattaggaatagctatatcaatattcccaatgactaagtcaacttgtgctccagctttggcgaattcgtctgcaatcgcaatccccatcttgccactagatcgatttcccaagtagcggactggatcaactgcctcacgtgtaccaccagctgtaacaattactcgtttgccgcgcaaggtgttttgcggagataatttttcacagacatagtcagttatttcatcaggttctggcattctacctttaccttgatagccttcagctaacatccccaccttaggctctaaaaccattacaccgtcagctttaagttgcgctaaattccgcgctactgccggattagccaacatatgattattcatagctggcaccacaattttaggacagctacttgctaaaatggttgtactagctgcatcatcagctaatccccaagccatcttcgctaaaaagttagccgtagctggtaccacaagcgctaattcactccaatcagctaattcaatgtgcggaattctagcttcattttcctttccccacaaatcatcaagcacttcttctttggttaatgctgctaaagtttggctggtaacaaatttctcagcattttgggtcatcactactcgaacttgatgcccacgtttttgtaaatttctgacaactgatactgccttatataccgcaataccaccggttaagtaaactgctattctagccatttattcttccaattaatcttcaaattccaattatcactatcaacaatcaatgaatcaatatagccttttaacttaggtcttacctcaattgaacgacgatattcttcagaattgataatctgctctttagtcattccacctttaccaacaaaataatcccagtgcatatctcctaagaatctagctatttttgccttttcttcatcgactaattccatattatctaaataccttaagtgatagcgattattttgttcaaataagtcccaaagatattggcgataattatttaaatgaccatgcttttcagcaggcgctaaataatcgtccatattaaaactatgtcttgtatagcataactgttcgtcattcaagctaatctctccgtagccttgatctgttgaactaaaacaagaagtaactacttcataagctgagcaatcagcttctttttttatactttgcgcatgaatatgccccgaaaagacagcctgtacattgtatttattaaacaagcgcttcacctgactcgcattatctaaaacaaaattgtgataaatgactgcattgtgcctgtataaattatggtgcatgaaaaacagcacatgttggtgattagattctgcttcaatgatttgactttcaataaaagctaattcttcatcgtcaatttgaccatgagtatgtggatgagttaaagaatactccatcggataaatattcgaatctgctaaaatcaaccgataacgcggactcaagttaacgctatatgctaaagaactaccatcttccctagcagcatagcgataactactatcataaaaaatttccttaaaatcttgaggactaacctggtcagtccgatattgaacatcatctttaaattttcgtgcccaaccatcataaatatcatgattacccggcaaaactaataattttattccatgccgttttaacggagcaaaaatctccgcaaaacgttgcatcgaaagacgctcaccattaaaagtaatatcgccagttaccaccacaacatctggcttttctttaagaacctttctagtaaaagcaagcaatgctttttgttgataatgtaagtctttacctacacttgtattctgcattttttgaaaagcccagcccttatcatggagttcattagcaatcaaatgtgtatcactaattacccagattttaggattttctttttgcgtcagaagattctttagcatttcccatcacacttcattcttatcgtttatttgcccaaaattggtagaaatcaactcgtaagttaccattaaataacttgcgttttttagtagctttttgaccaaaatatttttcaaactcagggtcactagttaagtaatattggctaaagtctttgtaacttcccaaaacttggcccatttcttcgtataacttgtgtgccccatctcggtctttcagtcgtttaccatatggagggtttgaaataataataccgttttcaaggtcagtcttaaagtcctttactgcaacttgtttaaacttaatatcttgtaaaacaccagcattatgggcatttagcttggcatattcaagcacactttgatcgatatcactggcccagattgtgctttcaagtggcttaatttgcgcttgagcctgctctactcctgcttggtgcaaacttttatcaaaccagtcaaagccgtcaaaactaaactcacgcttcatccctggggcaatgtttttagcaagtaaagctgcttcaattggcagggttccagaaccacacattggatcaattaaagggtgcgtaccattaaatggcgttaattctagcagtcctgctgcaaatgtttcctttaatggtgctccaccatgttcaacacgataacctctcttaaacaagctcgcacctgttgtatcaagagataagcgagcaacatctttatagatatgaatatcaagtggaaatgcattcccagtttctggtaaaaaaccacgacggtgatactgctttaccatcttgtcaacaattgctttttttacaattgattgaacatcaggttctgaatgtaacttgcttcttacagctcgaccttgaacagggaaagctgcatcaactggcaaaagaagggcccaatcataatcaaaaacttgatcataaagttgttcaaagcttaccgccttaaattctttcagtaaaatttttacacggtctgcacttcttaaccagagattagtcttaacgatgtcttcttgtccaccttcaaaaaagacccgaccattttctgtacgtgtttgatagcctaatttttgtaattctttacttacggtgctttcaaagccagcacccattgttgcatagagagtatatttttctgtcatagtatctttctaattcttaattttttcaataaaaaaagttgagtccctaaagactcaactagctttgcaaacttctataagccacgttctgttccagcaatagttagccaaactattaccttcagcaaccatctatcttcatgtctccatgatctcgcctttagttcaatttcttagacgaagacgcccctaccaaatttgggttgcccgctcgcagggtttacctcgttccaccaagctggtttcccagcttgctacgtcactgtggcactttcaaggatattcacacatagtcaaatgaccttagtgctttttccgccataataatatctaatatattatcctccagcttattgggctgaatacgatcactacaagcatcgcagctcgtgcgggcgtggactttcctcagctaaccgaagttaaccgcgattgctcaaaatttgcatcgaattttattataccaaaagcttattgattttgcataccaaatacgcgttgttccaaattatatactttacgttctaatgtagaaacgcgttgaataagctccatgttggtactaatttcattagttgggacttgagtttggacaggtctagtcttaggtgtgtatgttttcacatcatcaactggtgctgaaacaggagtagctggttcagcactttctttggctgtccgttgactttcaagcaattctctttgaagcttgccaatcttaccatacaagtcttcaataatactattgtatgtttcataatcagaaataatttgatccaagaatttatcaacttcttcttgatcatatcccttcatcttatgagcaaattgcttcttaagaatatcttgtgatgaaagtttaatatcttttaaatctgccattttctgataactcctttatcttgttttattttagcaaaaaaaacaagattagaaaaatctatcttgtcttacttagcttatttttaatatttagcctttttagccaaaataatcaggtcgatgagcttcagcatactcgtttgccgcatcttctaacgaatagaaatcaattaaatctaaatcgtaatctttttcctcctgatatttttgaatcaattcaaaatcatactttggcttaccaggatgttccggatcataaatcataatggcactatcagtatgttgaatcatgaagttttgatagtttcgtaattggaccggactttgatatggagaattagaagttgctccaaaaaaatcaacctgctctttcaatgttaaataatgattttgattatcttcattccagcgattggcaaattcttgatatggaaccatcattgatacattaacaggataatcctgctgcaaatcaagtgctgcttccaaggcccactgttcaacgcctaattgtgcaccagaaatcacccaatcaagttcatcattttccagcaacgcttgcaaatgattttttaaacaatacttaataactttgatttttggatctttcttattaaatactcctaactcataacttcgataaccagttacccaaacccgtttcatatcaactcacctttctaaaaataatatatctcactttgataattttgggctattggaaagcgttattttatagataaatagttatttaaatatactagtttccactttatagcattctttttgctataatcatattcagggagtgaagaaaagttggtaaattatccttctggctcttctgctcgactaactggtcaggacttccaccgaccgaagcagacaaagcgggccaaaaaagaaatcagtttctctgatcgaggaatgactttagaagaacaaatcaacgaatcaaataaatactatcttgaaaaagatctttgtgttgttcataaaaagccaaccccgatccaaattgtaaaagttgattatcccaagcgttccaaagctgtaattcgtgaagcttattttagacaagcttccactacagactataatggcgtatacaagggctactatttagattttgaagcaaaagaaacgaaaaaccatcgttcttttcctttgaagaattttcatgaccaccaaataattcatctttcgcgttgtcttaaacaaaatggtatttgttttacaattatccgtttttcaagtttgggacggtattttattgttccagctagttttgtaatcaacgcctataaagatccaactaaaagtagtatcactttacaagaaatagaaactgtttcctatgaaatccaatctggctttcgccctactctcccttatttggaagccgtagataaatttattgcagataggagcaaaagctaaatggcagagaataatcatcgttcagcaagtaatactgcacctaagaattctcgaatggccaacttgcatcatgatagtggtcaacccaagagacgcctctggctacaaattcttaagtggttttcaattggtattttgctgatactcgtttctggcgtcggtttatttgcttattacgccaaagacgcttcatcaattagtcaagatcaactacaaagtggtggttcaagtagtttctatactagtgatggtaaattccttctttcattaggttcagaaaaaagaacttatgttaagaattctgatattcctcaaactttgaaagatgcagtagtatctgtagaagataaaagattttatcaagaaaatttagggattgacccaatcagaattgttggttcaatcgtctcaaatgccaagtcaagtggtattgcagctggtggttcaagtatcacccagcaattagttaagttaactgttttctctaccgctgcttcgcaaagaactctaaagagaaaggctcaagaagcttggctggcaattagagttgagcatgactacaccaaaaatcaaattttggaatactacattaataaggtttacatgaactatggtgtatatggcatgggaacagctgccgattactactacggcaagtcactaaaagatcttgacttagcacaaacggcattaattgctgggatgcctaatgccccagttgcttatgatccttatacttacccaaaggcagctaaatatcgtcgtgatattgttttaaatgcaatgtatgctaatggtaagatcagtaaggctcaattaaaggcagccaaggctgaatcaattacacaaggccttaaaacccaacaaaatagttcagaatcttcaattagaaagattgatgatccttatattaaggaagcaatttcagaagttaaatccaagggttatgatccttataatgataacttaaagattactttgaacatcgatcaagatgctcaaaacaaactttatgaacttgcaaatggttcaagtattccattttcatcaagtaaaatgcaagttggtgcaaccatcattaatccaagcaacggtcacgttgtagcaataattggtggacgtaatttaccatctgttcaattgggacttgaccgggcagtacaaactggccgctcaactggttcatctattaaaccagttttagattatgcacccgcaattgaatatttgaactggtcaacagcacactaccttgaagatactaaatatgtataccctggtacaagcatccagctttatgactgggataacaaatatatgggtaaaatgacgatgcgctatgcccttgaacaatcaagaaatgttccagctgttaaaaccttagctaaagtaggtatgaagaaagcttcactatttgctaaaaagatgaacatttcagttggttcaaatcaaggtctttcagtagccatcggtgcaaatgcttcttcccttcaaatggctggtgcatatgccgcctttgcaaatgaaggtgtttactacaagccacaatttgtatctcaaattgaaacagctgacggtgtggttcactcctactcagcaactggaacacgagttatgaagaaatcaactgcctacatgattactgatatgcttaaaggtgttctaactgaaggttctggtactaatgcgagaactggtctttatgaagctggtaaaactggtactgttaaatattctgatgatgaattagtaaaatatccttcatacgcaaacactccaaaagatgcatggttcgttggttatactaagaaatattcaattgggatttggaccggttatgacaatttaagcgatggtacaattagtggtcaaggccaatatgcttcccaatatctttataagtatatgatgaagtacttaatgagtgataaggaaaacagcaattggactaagccaagcaatgttgttagaaaacgaattgttaaaggttctgacccacttgaagttacttcctcaaagaaaaattcaacctctgagttgttcctacgtggtcacacaccagatggctcaaacgaggattctgatgaaagttcttcatcatcaaattcttcaagttcttctaaagataacgaagtagtaactaataagagcagcagttcttcaagttcttcatctagtgaaggacatgaagatggctcaacttctaactcaagtagtagtcaatcaagcagtggtggcagtcctaacaacaatcaaggaacaactactaataatcaaacgaataacaacaataatactggccaaaacaatggcggcggtaataattaagtcttgatattattcatcataataaaagacactaaggattaatttcgatattgaatcggagttaatcctttttgttttgtcttcattctttcaacgttatatatagatattaattttatcctgttttgataatttagacataaaaaaacccgaagttcgtgttagaatttcgaggttcatattattatttattttgtaaatctttttttcgataataaatttgtgcgctgtcaactaattgacgcatttgaataattcgcacaaaacctttataaattgggattttaacgattgcttctggataatgttcttcaaaataagttccaaattcattgaagtcatcatatttatcaagctcatctacatttttaaaagttatccattctctctcgcctttttcgttcttaacaggggcagtttcttctaacagtggacgatcaatcgtagaatctgccaaatgcaaagcagtacaactttcataatctgtacccagcatgattactttggcatctaacttgtacaaatcaccgagtggactatcccaatcaaaaggcatgtcatatttgcgattgcgacaaatatggtctgcatccctgccccaagcacacatcgaatataaaggatgattagttctcttaacaccatcactagttctaaagtactccggtgttttgccaatataatgaattggcgtttcattcttatcaaatggcaccatattttccttaattatcatttgtgcttgttctgtagctggtggttctccccattcagcaggatcactcaaatctgcagtttgggcagccatcacaatatttccttcagaaaatatatccttcagtgccttaacgattgttcgttcaccacctggaatatatccaaaagcacttaaagatgtatgcacaatgcaactatcagtttttgctacgtgtggtataagcatattttttatatccttcatactggtaacagtatcaataattttttcagtcatattttgccttttactatttcaaataattataaggattaggatcttttgcccgtgccggcattgtatatctaccaaagaaaatcattgcatgatgagtttttatccattgctctttaggcaaaatttcttctaaccttttttcaatttcatgtggcttagcattttcagggacaatcttgaattttttagatatccgtgcaacatgagtatctactgcaattgctggcaccccatatgcttcagctaaaacgacgttagccgttttttcacctactccaggtaaagtcattaaaagctttttatctttaggaacttccccaccaaaattctcaaccagcatttgagccatttcttttaggtgtttagcctttgaacgaaataggccgattttactgatatcagcttctaaatctttaatgtcagccttggccatagccgctggcgtaggataatcgctaaatagtttgggagtaactcgatttaccatcttatctgttgtttgcgcgctaattgctactgcgcaaactaaatgaaaaacagtatcccaatttaactcaccctttgcgtcaggatacattgctaaaatttgatttagcacttttaatgcttcttcatcatttaaaagttgttcattgttatttttcacagtcgtcatcatctatctcccaaatatgtagttacatcattaggggtttttacgcccatcttctgccagtttaataatattcgatcaacatacttaaaattatatacttggcttaaaattgcttctctaagagctaatttaataacttctggatcataatgatcaacagttagccatgcagaaatctcttcacgctcaattggacttaacaatcttccaaattcaatctcgaattgccgtgccaattcattaactggattagtagaagtatcaatttcttgcttaccgctattcgtttttgtctcaatatagtggtcttgtaaatactgatctaattttatataaagtggctcaaggctgtactcattatttattaggccttgttcatcacgattttggactaactcaagataatcattttcaagcaaattctgcaaaagagttgaaactgctcctggggtcatattggttcgggcagcaatttcattttcacttggcaatagatttttatcttgagcaaagctttctagctgaattatgactaaaaatgcactatctgataaacctaattttgaatatgatgccagcaacgcattagttaaagttgtaaagccaaaagatcgataattaaaaaatgacttcattacatcctactttcataactagctaaaaaaagttgaactatttagttcaacttttttatgtaatattaaggttccattctgttaatcattcttgggaatggaattgcttcacgtaagtggtctaagtgacaaatccaagtgatagctctttcaaaacctaaaccaaatcctgagtgaggaacactaccatatctacgtaagtctaagtaccattcgtagttttcaaggttcaaaccagcttcttcgatttgagctttaagaacatcaaagttttcttcacgttcactaccaccaacaatttcaccataaccttcaggtgcaagcatatctgcacataagtattccttaggattttcaggatctttcttcatgtagaatggcttaattgaagttgggtaattcatgataaagaccggacgatcaaattgttctgaaatgtaagcttcatcaggtgcgccaaagtcatcgccccacttgaagtcacgaccagcatcttgcaacatcttaactgcatcatcatatttaagacgagtatagttaccttctgcagctggacgtaatttttcaacgtcacggcctaaaatgttaagttcgtattcgcaattgtcaattacacgcttaacaaggtatgagatgtatctttcttgaacatctaaagattcatcttggtgagtccaagccatttctggttcaatcatccaaaattcagttaagtgacgacgcgtctttgatttttctgctctaaatgttggaccaaaagtaaataccttaccgaatgcttcagcaccaacttcagcatataattgacctgattgtgaaaggtatgcatcattgtcgaagtattcaatatggaataattcagtagttccttctggagctgaattcattaaaataggtgcatcaaacttgatgaaaccttcctttttgaagaagtcataggtagcgttaatcatttcgttacggatttgcataattgcaaatgggcgacgacttcttaaccataagtgacggtgatcaagtaagaaatcaattccgtgttccttgttaccaattgggtaatcttcagtatttgatactaattcaagatcactaatcttgatttcataaccaaagtgtgaacgttcatcttcattaatcacaccggtaatgtaaaagcttgcttcttgacgtaatgacttagctaaatcaaatttttcttcgctaacgtctttctttaaaagtacgccttggaaaaatgcagtaccatcacgtaattgcaagaacataattttaccgcttgaacgcttgtcagtaagccaaacatgcattttgacttctttaccaacatattcaggcgcttgtttaattgaaattaaatctgtcataaaattaaccccaccttagaattgtactaagtaaatcataccaaagctttaatgatttatctatattattaacaatattatacgttatcgataaaagataactcttttcctgtcctaaatgaataaattgcatagccatatttaccattatacttacgatatgcaatttcccaaacagcttcattattataccaacctaaatttaggccatttgctttcgtatctgaatgtaacatactaaatcttttagttacttggtttgcgctatagccttttttagctaaaagataatgacctttattttgtttggttaaataaatataataagcagtcttccctttagaggtttgacctttgacagcgtaagaattcacaccacgatttaaatggtagtaagctgtcactttttttatcgcagtatatctaactgcacgattagctgcttgaatttttccagctgcttggccatgtgctgctaatccaaaaactgtataaaaaccaattatcaaaactactattgctgctacgactgcaaaaacatatttccaaattctatttcccagatacattatccttatcgtatccttttctgatatttttttctaattcatctaagttgacttgcacggggcgacccggcaaactatctaaaaattcaggaccataattacttgtccaaattctctgatctagcaaagcaaaaatcccgctatcctttggactacgaattaaccgtcccatcccctgcttcaaacgtaaaattgctcgtggtaaactatcttcactaaaaacatcgattccttgtctgcttaagttagtttgtctcaatttaacttcaacttgatctggagattcaaatggcaacttcgtcgcaattaccaagttaaccttagtctgaccaaagtcaacaccttcccaaaaactgttagcccctaaaatgattgctcttttagccacattaaatcgcttaacaatcttttcatttgaaccagtcacaccttgagccaataactcaaaatctttaaactcaggacgcgtaacaatagctgaatacacgtctgcaattgcttctaagttagtaaataagactaagaccttatcttgttttttaattgaatttagtaaaagtggtgccacaaaatctctatacaaatcatctgatggatataggggagcttttgaatccactaatgataacgctaatacttgctgctccaacttaaaattatagttactataaaattcggcgcaatcaagcttagtcaaacttagatttttcttactaaatgaaaagtcgccattattcgataaagttgcagaaataaagacaatctttttaaagcaagcatagattttttcaagctcaaagcgtggatcaagtaacatccaattcaaattagtagctagtggatcagctggatttgttacatcaagtaccaagccacaattgctaaactgctcatgatcatttagtaaatcactcaataaataagcctgctcagaataataatccagtaaatcaacctgctcagataattcatttaatctagcttcttctcttggtaagaagctgtcactaatttgatataaaattccgagtaactgattaacaattgtccggatttcttctattttattctgcaagctagctaataattggagaaatttatctaaatcggtaaatgcttccgactcaactgccacttggagatgaccgttaggaagaatttttcgagcaatggctgtatcttttttattgtacaagtaagtttgtaagtcatttattgcatgaattacatccccaatcgtactatctgctttatcagcaagattagcaataaccgggctatttttataatcttgggcaatattatcttcaccaaataaaataatatttcttaaatgactaagcatcccccaaaaagactcaaattgtaagctgttatttctagaattcataacaatatcactaaaacgatgggcttcatcgacgattaaataaggattttgcccccaaattgaatcttgatagtgatttgctaaataagcttgattggtaattaagatatcagcttgttcttgtcgataacgtgctaaattccaaaaatcgtatggtgaaaaaacagtccctacccgagcatctcccggatgttgaacttgtgcaaaatatggtgcagcaaagttcgttgtatgcaactcatccaaatcacctgtactagtttcagttagccagattaagattttcatttttaaaattaaagtttcttgattttcagttttcttctttaagctctgttcaaagccgtctaaatcaagatagtgtctagatgccttaacaacttgactacttaaatctaaccccgaaacttgtaaagcaagtggcaagtctttttcaattagttgattctgtaaaatcatagttggtgtagcaattactaacttttggccacgataaagattataaagacaactaaataaataactaaaagactttccagtcccacttggcgcttcaactaaaattgctttacgctcattattgaagaaggcatgtaatttgttaattagattaacttgagctggtctaaattctaactttcccttgaatagttgcttcttatcttcatcagatttaggaaaaatcgcttttttggcattatctgaatgtagtacttggtcttgcttttttaatactaaggaatgaacttgccggtactttttaggcaagggtcttttctcttgtctagtaaattcactaatttctttaaaaataaactgtgtatctcgcagcaaacccttacttaaactagttaaagtattcaaagtcgactgtggtaaagtttcaagtttatcaaaaatcttcaataataaactcgcagtcgcataggcatcagaatcagcttgatgaggattagtatgctttaaattaagagaatgagttaaatcacttagccgatatgaaggcaatgttggaaaagctatttttgataactcaactgtatcaatcgcccggttatggagcttaggaaagctatttgcggctaattccgcattcaaaaacggtaaatcaaaattgatattgtgtgcgacaaaaactgtatcttgcaaaatgtcttcaatctgagctgcatattttttgaaaactggttgattgataacatcagtaggtttaataccagtcagattttggacagcttgtggaatatcagcttcagggttaatcaagaatgaataagtcttaattatttgccgatttttaataatcgcacagccaaattgaataatacgatcttgaccacgtcttgttccagttgtttctaaatccacaacagcaaagacctgatcagaaagtgcctgattcacccacatcgactcctttcattaaatttgatcaaaaatctacttacttatcttaccatttatcgcttttaatacaccattaaatctacttaacttctacaatcttctgagcatcaagcaaaatcaaatatttacttttaactttttcctgacctagttgatttaaggcccgttcataaagtcgcaattgaccagtatatttatcttttattttatttattgattgtgctaattgatttttatttacataatctgttttatagtcaaataaaataattccatcatcatcaagataatatccatcaactgttccatggactaaaatttttgcattaggatctgaaaaaggcgtaaaaatatctgcagctggcaataaactcgaaaatgaaacttccctctttaacttacctggctcattccaaaacttcttggcaaaatcactatttacaaaccaagtgatttcagctattggcaaatgagggacaattttggaatttaattttccagactgaactaatctttctatttcagcttcaacactagtatttccttgataatcaaagaactgcaaaattaagtgcatagccgttccaatctctgcaccagtaaaaccatcttcaaataaaaagcctggtctagtatcaatgtcttgcaaatagcgattagctgatttgataaatcgtgaatttgctaattcatcatcaattggatcattaaaagctttcttcagttcactaacagattggtaagcagttgttgttgttgcatctttaaatggataagtagcttcgtacagtttttttacatttttgacaataaattcacttacctcacctttttcgtccatatttgtctctttagctaattcaacaactgtcgcatcccctgttaccactaagaagtcttgtttactttctacttctggttgtaaatcagtaatttgattaataaagtgatgcgctaagtcaagctgcggtaaaagcaaatctgccggtttttgcgctgctaattcactagttaatgttaatgaaccgttattagccaggctagcttttagattgtctgtatcttttgcaaagtctttgaaattagttaccaaaattaatttttgtctggctctagttactgccacgtacataattctagcttcttcttcaagcaattgcttttgctttgtaacattgcccattgctttaactaaagaatcaattcgccaatctgaacgaacaacagtaatcccacaactatcaccactaattatataattgccagacaagtcgctcttttggaactggtgctctaatcccaaataaaagacaactggaaattccaacccctttgaagcatgaatagtcattaattggacgctattctctgcttctttactaagtaacggttgtgctaaatctttttgatttttgcgcatacgatttataaaattaatgaattgatacaatcctttaaatcccgcactttcataagaattagctctttcataaaggttttcaaggttaattcttctctgcttaccatttggtaaacttgtcacaatttccaataaacttgttcgagcataaatactccaaatagtttcactaattcgatgattaagtgcaaaatcacgtaaatcagcaagctgattcaaaaagtccttaattcttttacttagttcatcattttcagaaacatagttagtgagtgctgaataaaaactcatatttggtgacttaattctaatcttagcaagatcaggttccttaaagttgaaaattggtgaacgaagaactgcaactagtggaatatcttgatcaggattatcaactatcttcaaatagctcataatgatggttaattcaaaagtttgaaaatagttagctacatctgaaacaaataatggaatattattttgggcaaactgcttaagcaaatcaagattttggctgcgacttcgagttaaaattgcaatatcagaaaattcgattggccgcttaagaccagtttttacatcaaatacttcaaacccttcatctatcaactgcttaattcggttaatgacaagctgtatttgattactttcatcactagcttcacttttatcatagaagagcaattcacttgctgctggcaaattatctggataataacttgctccaaactttagctgaccttcattttgataatcaatcccaccaaaatcgggcgttaaaagtggattaaatagcttgttaactattttggtaaccggtttagttgaacgaaaattatcagctaagactatccgctttgaggatgaatcttccgcaaacttctgatatttattaagaaacaaactaggatctgcttgtcgaaagccataaattgactgcttaacatcccccaccataaataagttgttatgctcacacttcattaattgaatgatacgctcttgtaacttattaatatcttgatattcatcaactaaaatttcagtaaatttattctgataaaactgtcttgctaagtgaccagctgttgtatcacttgtcaaaatttgatatgccaactgttccatatcgctatagtcaagtaaattttgtttacgctttaatgaattaaaagtagcaatcagctctttttctgctagacatactgccttaataatcatactggactgcttcattactgcagtttgttcttcattatcaactacaaaaaaggccgcaaacaatgacttaacttgttctcgtaattctgttctaacttgacttaaactagcatatctatcaagaatatcttcatcccatttgggacttttacgaggattttcagtaaattgacaatcttgtaaactagcccttatctgatcaaaacttccattttccaaactagtttcagcttgagccaatctcttactaaagctcaaaaagtctttcatgattttttcaagttcagtcgcttcattaaacggatcagccaaaatcttatcaactttgtctgtcatttcaattaagattttagatagatacggctttataacctttacaaagaaaggtgcctgactcaaatcatcggctagttcataatctttagctaaactatcaagccataagtcataatctggacgtgccatcgcataattatacaaatcaagtagtaattctctagccccattagcatcccgatctccagcaaaattatcatagaagattcggtatggattatcctgattagaaaaggcctttttttcaagttcacgcaaggctttttcttttaataatgcggcttgcgtttcgtctgttaaaactgaaaaactggggtcaagtccaattacataataaaagcggtgaacaacatctaaacaaaatgaatcaattgtcgaaatatttgcaacttcagctcgcaaaagttctctctttagctcacgactattattttgagcaatttcctcatttaaaacacgcttaatccgttccttcatttcgtttgcagccgctttggtaaaagtaataaccaatagattgtctaaactagtaccatctttaattaacttaattactcgttcagctaataccattgtttttcctgaaccagctgatgctgaaactagaatgtctttttctcgtgtattaatggccgcttcttgctcttttgtataattaaccattatcttcttccttttctagaatttccttaatgtattgcataaaactggccttatctaagctattaatctttcgatagctattttcagcaagtttggcatcaaaaaagaaaatatcttggtagctagaatatttcaggccattttcttgtccatattgatatggattaagagctaaatcacctgttaaaattgcccttccagctttcctaattaaatattcgttatagcgtaaaactaacttcaactcatcttccgtaaaatgacgatctcttggtaaagttaacccaccacgagcttttgaacgtacagatttatacagcttggagctaaccttaggctcttttagttctggatcagctgtcaaaatataatcttcattatttacaagtaaacctgaataaactaaacgttgcttagcttgctctaaagcctttttaggtaagaaattgctatcaagttgatcagccttatttaatcgttcaacttgtttagtaattgtttggtaaaaggcccccaataaatcaagtgattcatttccgaagaaactcgcattttttgctaaaacatcaagatatgaaaccatttgtaggctaattccacttgcgaataatgctaaatcaaagtttttgctggaagacttatagtcaataacttgacctagtagttcatttttataaggggctaaatcaacacggtcaatttttcctcgtaaatctatttctcttaactgatcaagtttaaatttcaatcctgctagcttgtttccactaccaaaagctaattcagaatacgctggtctaaatggagtttggcgcatgcgttttttccaattaaaggccactgcattgactgttttatctaaactagtaaataaatattgattaaatggctcagataataattgttcatagctaccttcttgatgaatctgctttctaacttcagttaatgcagctaaaatctgatcattagataaagtagctaaatctatttgctgagcatgcgcatatttaaccaaataatcaaaagtttggtggaaataattacctgcttgaattacgtcaagttcgttttctgctctaggtcttaaacgcaaaccataattaaagaaatattccaatgaattttgatagtaagtttcaagttgtgatactgatgaagtcaacttcaccccatataattccctagctagttgttcacccaaattaacgggttgattattataattgcgtcctttaactagttgagaatatttttgtggcgcatagtttttagctaaatctaggagcgtattttgataagctggtgaaagattagttaaatatcctaagctagcctttgcattagttgtaaagcttaaaatatcactagcatcttctttaggtaaatcagcctgttctaactctctagcccctaattcttgcaatttagtgtaataagtagaaggctgaatcgattcattagctgtatttaaaaatggatatgaaacatatacccaattacttgccaaagttaaacaagcgccaaattgataatcttgatcaagattggctagttcttgccgatcctctaatgcattatcagtatctgcgctactaatctgggctaagttctcgctcgtcaaaaagccgggagtattactaatttggggtaaattgctgctacttgctccaattatgaaaacatttttataattcttggcttgcaccattcccatttcagataatgacactgcatcaagactggctggaatttgggcaaaattagcttctttaaatccagaaattaaaattctcaaaaaatcactagctgaaaattcttcttcaggtttatttattaataaaaagtcatttaataaattaagtagcaaatcccaaatttgcttaggttcttgacttgcttgtaaatcatttttgtcaattgcctgctttctccatgtttccaaccgcttagtaagccctatttttactaaaaaatcaaaaaagaacttaactccagccttaacttcacttgtctttttaaattgttcaataaaatgactcaactctttaatgataacttgacgtagcttttctaagcgttcaatttcagtagctcttttatcaagagtaataactggtcgtttgatctttacaaagctagttaatggacgattccataaataatagttgattccatgtgccaaaacaaaattctctaattcatctacatcacgcaaaaatgctgcttcatcatgataaaaagccggaataaataatcttgtcttgagcaaagcaaataaacttgctgactcaaaaccagtttccagaatagtttgtaaactttcaataaaaataaccagtgggtggtatttcatttctttttgtaaatcattaaagaatggaattccattttgacgcaagataggagttaaataagtttcatattcatgtaaattaggtgccaaaactaaaaagtcttgatatctaaacttattcaagcttacttgttgatatattgtccgagctacaaaatatgcttcatcatagcgagaatcagccttaattaattgtacatttggctttgtctgctcattactctctaaatcacctgtccaataatggtctaatagctgcttagccgttaaatccttgactggactttcatattgttcatgagaaaaaattatccgcctttgtaatttctttatagtcttttgaacaacataatcataatcgccagcttcaggtgcagttttgatttttccatcttcagtagcaaaagcaagtacaactttttgggcttgtttgctaaagagttcaacagctacttgttcagttccattaaattgagaaaaatcaacaaaataaaagctacagttcttaagtcgattattaccggcaagaaaaatattcatctcattcaaaaaatcttgcttagtgataaatcgttcagcaatagcatcatcaaaagctgttttgataatagctaaatcatgtaatttgtttttagtttcttcatcagtaacttgattttgtgcttcaattaaatcaaaatcgctattacttacttcattaatagactggtagatttgtttaatcaaacctgaattttgagaaaattgattaaataaaattaattcattctttttctctgttactattttttctaaaagcatgctacttgctgcttcatcaataactggcttcaatacttctggacgatcttgtaaaaagaaccaggccagacgagaaaatgatagaatgtgcaaattcttaactgaagcttcagatttacgccgtaatccggctaatttagttattgcttcaatttctgtggtaaacttaatatgattaggaacgataataaaagtttccagttctggattttgctcgtaattttctacagcttcagccagaattttttcatgtaatgggtcactttgacgcccagttaaaatttttagcattgttcaaactccttatggtcttaattttaccataagcattattggaggaatttttttgcaaacaagttatttagcccatggtaaagtaattttgattggtgaacattctgttgtttacggttatgatgctctaagcatgcctatacaaagtttaaatattaaaactactgtaagtgaaaacaacaatccctgtcattatatggatacagatcgctatcatggagatttttttaaagcgccatctgaatatgccggtcttaaatatattttgcaacattttttgacacttaagcctaatagcccctacttaaaaattagttatcgtggtttaattccaattgaaagaggattaggttcaagcgctactgtatcgttaggaacaactaaggccttaaatgacttcttccagttaaacttaagtgaacaagaaattatggcaattactaatcatgccgaaactattaatcatggtaaagcttcaggtcttgatagcgctactgttaattcagattatttagtctttttcaacaaaaaaacaggcgttgaaatactaaagcaaaaattaaatgcgacattattaataatggacactggtgatttaggcaatactaaagaagcagttgaattggttaaaaatgaagttactaactcgccaaagcaagccgaaaatctaacaaatttaggtaacttaactgttcaagttaaaaaagcctggctaaatcaggatgcagaatgtgttggcaatgcatttacacaagctcagaaatatcttgcaaagctaaaagtttcaactcctaaaattgaccatttgtgtcaaatagctcttgatactggggcttatggtactaaattatctggtggtggtttaggtggtattgttattgctctatgctctaatcaagaattagctcaagctatcgccaacaaaagtcataagttaattagtaattactggattgaggaaatttaatgaaaaatactgcacgtgcgcatacaaatatcgctttaattaaatattggggaaaaaaagatgcggacttacgtctacctttaatgtcaagcatctcaatgactttagacgctttttacactgacactagtttaataattgatacagaagataaaaaatttattttaaatgggcaagaagttacaggccaagctgctaacagagtttttgcttatgttgaacgcttgcaaaagctctttaatgtttctggtaattttcacgttatcagtgataaccatgtacctactgcagctggccttgcttcttcaagttcagcctttgcggcattagcagctagctttgtaaaagcatataatttatctatttctacaaaaggactttcaattttagctcgattaggatcagggagtgctactagatcagtgtatggaggctttgttaagtggaacaaaggcactaatagttccaactcatttgctgaggtgatcgaagaaaaaccacaaatggatttacgcttactggctgttgaagtgaatgtagctgaaaaaaaactttcatcaactgaagggatgaaattagcgcagacctctcctttcttcaagccttggattgcccgcaatgacgaagaaatagagcaaatggaaactgcaattaaaaataatgatttcactaaattaggccaactagccgaacttagtgccagtgaaatgcatgcgataaacttagccgctcaaccgggttttacatattttgcaaatgaaactttagaaattattaaactaattcaagagcttcgtaataatgggcttgaatgctactatacaattgatgctggacctaatgttaagattctttgtcagaaaaattcttgctctgatataaaaaaatatgttaaaaatatcttacctaatgttaaaatagtcgaagctggtttcggaccgggaatcacctatttatattaaattcaaaaattaatttataaagattcgaggaagataatttgattacagaaaaagcacctggcaagctttatattgctggtgaatatgctgttttagaacaaaattgtccagcgattattgtcgcactcaatcaatttgtacgtgtatctatttcagctgcagtcggtaatactggaattattcattcaaagcaatactcacaagattcaattcattggcgccgtcaaggcaataagatggtaattgacaatcgtgataatccttttgaatatatcttggctgcaattcgctttactgaacaatacttacttgagaatggaacttcactaaaagtatatgatttacatgttaattcagacttagatagtaaagatggacgcaaatatggacttgggtcttctgctgctgttactgtagcaactgttaaggcaatcttagccttttatggaattgagcgaaaacatgacctagtctacaagttagccgcaatcagtcactattccgttcaaggaaatggttcagctggtgatattgctgcaagtgtatatggcggttggctagcttaccaaacatttgataaagactggcttaaacatgaattagcaactaaaaaactcagcgatgtcctcactgaagcttggccaggcttacaagttcaattgttaactcctcctgaaggaatggaattagtcattggctggagtcaaaagcctgcatcaacttctcgcttagttgatgaaactaatgcccaaaaagaaaatttccaacaagaatatgaagcattcttaactaattcacgacaatgtgttttaaaaatgattgccggttttaagcagcataatattagtcttattcaggaacaaattcgagtaaacagaaaattattggctcactttgcaaagttaaatcatatagcgattgaaattcctcgattgactgaattaattgaaattgctgagaagttcggctttgctgctaaaacttctggtgctggaaatggtgactgtggaattgttattaccaatcacaatggtaaaattgctgatttaaaagctgaatggcttaaagcgggtattttaccacttgattttcatgttcatatattaaatcaaaccaaggaaaaataatgtcaaatcactcaaaaagaaaagaagaacatttagctttagctaaaaaatatttcgctataaaagaaaatgattttgatcgtattgaattagtacgccctgcccttccggaaagctgcgtttcaccagccacaattgcttgtgaaattttaggtaaaaaggtcaaggcgcctttttatattaatgcaatgactggtggctctgaaaaatcaaaagaaattaatcgcgcgattggaaaagctagtcgaattggtcaaattccctttgctactggatcaagtagtatcttagctaaagaaaaagatcaactagctagcttttatgctgccagagaagaaaacccagatggcttattctttgccaatgttaaccctaataccccagctagcattgctaaaaatatagttaaggaattaaacgctgatgccttacaaatccatattaatactgttcaagaattggcaatgccagaaggtgaccgcgattttgtttggcttgataaattaaaagctatccgagatgaagtagatatccccgtaattattaaagaagttggctttggctttgataagtcgagcattgatttattacaaaaaaatgattttcatcttattgaccttggtggagctggtggtactaactttgcccagattgaaaatggacgctctagccatcctttaccctatctagatgaattaggactttcaactgttaaatctgctctaatcgctcaagatagtggtatagacttctttgcctcaggaggcatcaggaacgctttagatattttgaagtgtcttgtcttaggtgctaaatctgttggaattgccaatttattcttacaagtctacgaaaatggcggcgaagatgggttagttgaaacggtattacgtttcgaagacgaattagctgggttatttgccctctttggaattaataaagtgaatgaagcgactaaggttaaatatgccttaactaagggcttatggaaagaatttattcaaattgcagttgatgattaaaaaaagcaggtatttacctgcttttttattttcaaattattattttacataatttaaattatttacattcagactctcaatcccttaggataaaagttttttactacttgccctgctactttaccaaaactaaagattttaccttgataactaactagtacaaacccctttaacttcttttccgttttaacagtttcgccatgcaagtatttttcaaattcagcttgattttgtaattcaacaactctttcttgctgcatttgacctaaatattgcgctaactgctgactaggctgaaaacgtccctttttcaaaattcccagttctaatccattgttcaatacttttatttgagaagtatcttctacagccggaatataaacatgatcattactcttagctgccttactaaagtcaaagcttactggtaaattaaagctagccaataattcctttactagctctttctctgccttggtaaaaatttctacttttttgccagctttttttcttcttttcttatttttttgcttgaagtcatcaatattttcttcagtatcactagctttagataaaataaatttagctaaaaattgcccttcacctatctcatcttgtggccaaaatctccttgcatattcgattccagcaagattttctccccaagcgggtactccagcacttgccacattaactttagttttaactagcttaaagcctaatttattaaccaaataagcacaaattttttcatcttcttctggagcataagtacaagttgaatataatagactgccacccgtttttaacatcttaactgcttcatttaaaatctctttttggcgactactacattcaagaacatattcttgactccaataagttactgcatcatggtttttcctgaacatcccctcaccactacatggtgcatcaactaaaatcgcatcaaaaaagtgggggaacttcttagctagttggcttgtatcttcattagtaactaagcaattgctagctccccagcgttcaatattttctcgcaggttcttagccctactagctgaaatttcattggcaactaataagccttcattttttaaagcggataataaagcagttgattttccgcctggagctgcacaaagatccaaaaccttctgtccaggtttaactcctagtgcttcagctggatacatggcggaagggtcttgtgaataaacataaccactaacccactcaatatctcgtccacttatttctccataataagcatcttctactccattaaccggttcagataagtcatagcttactttttgataattagcctttaatgggttcaaacgaaacgcctttttaggctctgcttcaagagcagtaaaaaagctactagccttagtagctaatagtttttgatatttatctataaattctttaggtaaaactaatttatccaattttttcctttcttttgttcaaaaagactacaaccaacatataaatcacaatatttaagacaatcatcaatgtcatcaaaattattaaataatctaaactagtaaaatacaatctccaagttaaaagaatataagatacgaatcccataataagattaatgaaggcgaatctacctaatttggtagcaataaagtatttctttaacggccggtcaattccatccatttgtttataagtatgattaataattgcacaggcccctgctattagtccagcaaacaatactataattcccagcaaaattgagaatgctatcgcccgaataaagtgcgttctacgatgtgttgaaactaattctgaaaaagtcacttgaccattgagatatttacttataccttgaataactcgattagatggcgaatcaataataatatcaaaattattaagacgatttttggaattggcttggttaagccctgttgtcaaataatactttgtttgaatattatcactaacttcttttaatgtcccgactacagaaatataacgattatccagcacaatgtatttattatcttgggtagttaacatctgaatatttgaggtcggtgatacaatcccaaatgtcaccacaccatcaaattcttcagggttaaaataacgtccccttgcaactggtaataactcattttgataatttgaccaaattaacacttggtcttgatcatacttattagttaattctaaagttattttttcattagggtatttttcagtgatgtactttaacagtgttctaatctcaatcttgcttttagtttttaaatttctagaataacttgataatccgctagcagttaacacttgatcggcacttatactttgaatatttgaaactaatactcctgctattaaaaaacaagcaagcaaaaaaatccccaaaaatgtctttttaatcttcatctatctcaaaaaatctttcctcaataaagtcaaaacttgaaaaactagcattaactgccactaatgctgaattttcactgaatggtgttgtttgccaaaaatcttcagaattagttactccaaactcctcaccaacaaacagcaacttaggcttgtgttctaactttttccaagtattaattaaatcaatatcagcatgtccaaaatttggtgcccaggagcaaataatcaaatcacaatcttgatatttagttattgcagttttagcatctaaattttcaaccggataaaagcaatttttaccagtctttgaagtttttgaccaaactaaattatcactagccttaactttaattcctgccaaacttaaagctttagaccaagctgcattgccagccataacttcaactgcactagttacattatatttttccttgattatttgtgctgtctgaatattaggcaaagaccacaagccataatgtaaagacaaatactgtcgaaaactattaagtaaattattggctacttgaactttcttagttttattctcctgctctgtaaccaaacctaatttcttaatttgagattctggcaattcttttttatctaattttgaacagacttgtctaatctcactaacctgttgatgtagtttgggaatattcaattcactatctattttaattaattttgttaaaaaatcagtcatctttctatatccttaataggattttaccattcaatcaacttaaaatcagttataattgaaaatagattaataaaggagacgttttaatgggaaaaaatatatcgaataaagcagctgaaaatgaaagcttcggcaaatggttactgcaagttttcgtcatggccgcaattttgttagggatttattacttaatctttagttttgttttatcaaatgaaacagtgtctggcccttcaatgcagccaacgtttgaaaatggtgaccgaattatagctgttcgtcatactagcttaaaacgtggtgatattgtcattttaaatgctcctgacgaaccaggtgcattatatatcaagcgtattgtgggaatgcctggtgacagtatcacttacaaaaatgatcaattatatttaaatggtaaaaaatactctgagccttacttaactgaaggtaaaaagctttatgcaaacggccagctttatacagaaaactttagtttaaagagcaaattcggtgttaataaggttcctagtggtgaatatttcgtaatgggtgatcaccgcaatgtatctaaggattcacgttactttggctttgtaaagcgaaaggcaattgtcggcaaagttattttccgttattggccattaaccaagtggtctaccttttaataagacattatttcaactacaatagaaattgagataaatagtggatttattttaaaggagcctaattaactatgaaccaagaagaactttcagatgtaattataacttatcaagtaaaacatcacgttaatgatactgaactagcttttgcaagccatctttcagttgaaaagattcacgctatgaaaactggtgatggctcatttactagtgaagaaattaatcaaatcttggaatacattcaaagtcaagattaacaaagaaaaaagtagcacttcgtttgaagtgctacttttttaatgcattcccagaattaatggtaatgcagcaattgtattattaagcatatgagttacaaatgaataccgcaaatcctttgtattcatgtaagttgcagctaaaattgcccccattacccaataagtaaagatgtgaattgagaaagttggatcatgtaaccaagcaaaaaataagccgttaacgataatccctagccaataatttaacttggtttcttttgtaaaagcaatattgaaaaactgtcctcttagaattatttcttcaaacattggtgccaagaaaataataaagacaataaagtgccaatcagttcccttcgccaattgatcaattgccttttgattagctgaatttgacgaagttgataaaagtatatttatcaaaacttgcgcagcaatcatcactacaaacgccaaaccactatatcctagtttggaccatttaaaatggggcttttcgttaaaatgccactcattttcctgttccaattgctttttataaatatgataaaccagcatcaccaaggcgattgttgccacataaagtacaaaatgatattttcccagcacttctttgtggctatttaatgatttgggaataatatatgatgtcattagtaattcatataatatgaatgaaactacaaaaagtgcgattcttttcaaatatgaaataatcttcactaaatttcctccttttcatgtgaatgttcttagtataatacatttctctcgactatacttttattctgttttactttcaccaattagattaaagagaggctgaacaactatccaaagaagtaaggacaaaattaccataaatgcatttcctgttgcttcagttgtaccaacatgtaaaaacataaattcaaatccattaatagcaattattaatccaattataacaagaattatttcaataatattttcaaaaattttgtttccagaaaaaggcaatagagaaataattccatatttacagatttcaactaatgcagtgaataatagccaagcaaagcaaaagaaggtcaaaaacactaaatcattaagaaattcatattttgcatcgaaaagtaatcttaatccatttaagacctggttacttgcccataaataagacacaacataagaaataaaagttagcaataattgtccaataaatagataggcacaagctagcaatgtacttaaccactgtgcagtaaatattttggtgcttgataaaggaaccaagtgccaagtttgttttcttaaatctttagcaaagtaatatatacaccatacaaaaaagagtaaatcaaatttataaagtgttgatgaaaaactcataactaatggtagacctttatcttcaggaacaagtgaaaaatctacggagctccaagctctacctgtaattaaaaatccagctaaaattaaacttattaaaaaatacattaataaggtaatttgggcctgtttcttttttatctgaaaaaggaaattggttaattttaacactatctcacctcttacacagctttagcctcaaagaacttctggtaaatccaagtatcagcaaaaattccaaccaaaacaaaagtagctgtttcagcaacactaagccatactgctaataaatcaacttgcttttcaattattccaactccaaatacatttgagaaaatatgaataaagtaagtaataattgcataacaaattacagcaaaaataacacgcaatattccaattaatttcttactcttaaagcctggcaacaaattaacaattgtttttgaagaaaagctcaaaaaattaatcatcaaagaaaaactaattaaccctaaagctattaataaagctattcccaacccataaagagcaatttcaccaacaggtacctgtcctagggttttacctaccgaaatatcttttaattctggcttacttgccgcaaatgctactgttattaagactacgcaagttcctaaatcaaataatgccatataaaacagtgtcacataagttgtcaaaatattagccaaaaagaattttttagaactaattggcaaaagttgccaggtttgtgactcatacatctttatttcatcaatgaataaaatgcaccaactaattaccaatgcaaagaaacttgtggttaaagcaataacttcatagctaacaaagattgattcaaattcttttggatttaccaaatacaaatatgttccaattgccataatcgctgccaattgaattacgtaaatcaccaaaatctttttagctttttttgcttgaagcagcttaaatactgtactaaaattcgtcattttatcctccatttctaattggcctttgcttcaaaaaatctttttaaaagatacaagttaattgcagtaatcaccaaaataactaacacggaaactccattactcatccataaggaacttaaatcaaaatttgatgtcgctgtaaaaggattgtcttttattttcaagagagaattaaaaataaaactaaaggtattgcctataattaaatagcaaattattccaataataattctgactatattaactaatcccttactcttaaagcccggcaataaattaataattacctgagatatcataaccagaagaataatcattactacaaaactgattgcagctaatactaaaaagattcctattgaaatcatataagctgaaatttcactgactaaagatgtaaactttgagctattaataatttcggataattcagatgtcgttactgaataagaaagtaaatatgtacctaaaataattattccgttgatagcttgcaatgctaaaaataaagcaattgctaaataagtagttaattgatttgtcaaataaaacttagctgaagaaattggcattaattgccatgtttgactctcatagcttttaatttctttataaagaagataaaagtataaaaataggcctgtaaaaaaaagcgtaataaattcggctaaaaagaatccttcagccaaagaactaagatggtcgttaaagaacaaaaagctaccaatagcaatcattccaattacctgcaatagatacactaaactagcattttttagtttaggcacctgcatcactttaaataagttcttgaatgaggtcattattcttccccctcataaaagccttgatagaaatcttcaatactagtattttcacttctaatttgatcggcgctttgatgagttaaaattctattatccttcaagataattacttcatctaatagagtagcaatttcattaacaaaatgatccgaaatcaaaatagtggccttatcatctttccataagataatagaattgataatcttctttcttgccattggatcaattccagaaaatggttcatctaaaagatataagtctgcttttctggcaaatgttaaggcaattaccaacttttcccgcatcccacgtgaaagttgtcctaaacgcatatcgggagataatttcataaattcacgtaatttagtaaattcctctaaatcaaaatcagaataaataatttcataaaacttgattacgtatttaattttggttgaatcagaaaagcctgttaatttatcagtaaaagctaatttagcctttttttctgcttcaccagtttcaccagcaactttgatgctaccagaccagttttttgcaacaccagcaatacaccgcatcaaagtagtcttaccggcaccattttcacctaataaagcaacaatttttccctgggcaagatccaagttgatattatctaaaattgttttttggttctttttataagtcaaattgtgaatttctaaagccttattcattatttttctcctaaattctctaaatagtttgataacgttggaataagttcatcattttttacacctaaacgatgcatattttccacaaaatcatctaattcacgtgtcagaagctcttttttggtcttttccaaaagcgcagtatcttcagtaacgaaattaccttctccacgctttgtaaataaaatcccttgattattcatttcttgcaatgctcgttgaacagtattgacgttaacagttaagtcaacagctaactgtctaacggatggaattctttgaccagctggtaattctccttgtactattagccgatataaatgctgctcaatttgaatataaattggcacattatctttaaattccatattctcacctcatttattgtgctagctatgtaatacactgttatattatcttaacttatatttttttgcaagtagatagtttatttgtttcacgaattgttattaatcaactttttctaaaaaaataagctaataaatacctatatatcagtatttatcagctatattttttgtaaattagtattagtgaataacttttctttaatttttcattatcaaaaaagccctatataccaatactaacaaatcaattattaaaacgaagtaaaataatttatattatttttgtttcactacttgcttctttctgcatgaagttgcgccattttaatcataacatcaacagctttccacattgattcaagcactgtgtattcaaaacgaccgtgcatgttttcttcaccagcaaacaagtttggacatggaaggcccatgtaagttaattgtgaaccatctgtaccaccacgaactggatcttcgttaattgtcaaaccttcagccttatatgcgtcacgagctaaatctacaacttccatgtgctttttaagttcgtcggccatgttgtagtattggtcccacatcttaagtttaagtctttcttccccgaattcatcattcatctttttaacgattgattttaccaagttcttacgagcttctagaccatcacgttcaaagtcacgaataatgtagtcaagatgagcatgatcaactgttccttggaagttcattaagtggtagaagccttctctaccctcagtttgttcaggaacttcattttttggaagcgcattttggaaattgatacccacttgaattgcgttaatcatttgacccttggcaacagctgggtgaacattaacaccttgaatatcaaggccaaattgagctgcagagaaagttccccagtcaagcttaccaggagcttcaccatcaacagtataagcaaaatcagctccaaagtcttcaacgtcgaaatgtccagcaccagtaccaatttcttcatccggagtaaagcctaaacgaatacggccatgcttaatttcaggatgagctagtaagtattctgcaaaggttactaattcgctgacaccacacttgtcatccccaccaagtaacgtatcacctgaagcagaaataatggtttgacccttatatttcttcatattagggaaaacagcaggatctaagtaaaattcactgtcacctagttgaattttactttcaccatcatagttttctacaatttgtggcttaatattttcactattaaagtccgcagtatcgcagtgtgccaaaaagcccattactggcatgtcatagtcgacatttgatgggatttcagcaattaaaacgccagctttttcattgtagtgaatgtccgaaagccctaattcttctaagtccttcttaataatcatttggaaatcaacttcacgttgagtagatgggaaacgatcagcatgctcatcagagcgtgagttaattttaacgtatttcaaaaaacgaggtagtaaagttggatattccataattatttcttctttcttacattaaatcttggaatggatcagttgattcttgtgagacaataatttcaactggccacttttcatcagccttaaaatcatttaaaatttcagcacatttggtcttaaacagactctctgtgtaatggcctggatctacaacagttaagccacttgaaatcatatcatggccaacatggtagtaaacatctccagtaatatatgcatccaagttatccttgagtgcatcacgccagaacttaccaccatcaccacacacaaaaccaactgttgatatcattttatcattacttgctgtgattaagcgaacaaaatcaacattcatttgctttttgacgtaataagcaaaatcaattgccttcaaaggcttgggtaacttacccttacgtccaacagcaattccgtcatcatcaattgcaaatggttcaacatcagtcaagcctaattcttcagcttgccagtcactagaaccattttcagctttatcagaattggtatgaattgaataaacagtaattccatttgcaataattttgccatacatcgcattttgggggtcactgaagtctaaatttctagcaggtctgaacattactgggtggtgagaaatgattaagtcaacacccttttcaactgcctcatctactacatttggacgcacatcaagtgtagtcataattttagtaacttctgcataaactgagccaatttgaagcccaactgggtcaccactacttgcaatattttcaggaaaacgttcattcaattttgcaataatgtctttaactttagtcatttgttagctctccttcaataaacttaattctttgctctacttcagaaatacgagtcatatctttatttttagccttattaagattaaccaaaagctgcttttggtaggcaagttggttagtccactttttgataaagactgaattcttctcttttaataaaaatggtccaaataaaatttctttatcagataactgatgcatcttgtcagtcaaaatagccttaattagttcataaatatgaccagcagtatcaataatttcttcttgaataatctgataattatgctccattaaccactttctaacgcctggctcgccgatattaggttcgaggattaaagtaggataaagttcatctttttctttagcagcttcaagtaagtcggtcattaacttaccacccatacctgcaattacaactgtttcaattttatcttcaggcttaattgtttctaagccactaccaagacgagtttgaatttggttgcttaatcctgcttcaagaatgtctgttttggcattgtctaaaggccctttggcaacatctgaagcaatcgcaaattggatctttcctgatttaactaaatcaattggcaaatatgcatgatctgtaccaatatcagctaaacgtgtattttcgtctaccattgccgctaaatgggcaagtcttgtttcaagcatggcattccctcctatttattgattgtatcaaaaaagccccgataaggggctttttatttcgcttagtctaagaaatcttttaattggtttgatctacttgggtgacgtagtttacgtaaagcttttgcttcaatctgacgaatacgttcacgagtaacaccaaatactttaccaacttcttccaaagttctagttcgaccatcatcaagtccaaaacgtaaacgaagcacattttcttcacgatcagtcaaagtatctaaaacttcttcaagttgttccttaagcatttcatatgatgcatgttgttcaggactagtagcgtctttatcttcgataaagtcacctaagtgtgaatcatcttcttcaccaattggtgtttcaagtgagacaggttcttgagcaatcttcaagatgtcacgaaccttatcagttcccatatccatttcagcaccaatttcttctggcgttggttcacgtcctaaatcttgtaaaagttgacgttgaattctaattaacttgttgatagtttcaaccatgtgaactggaattctaattgttcttgcttggtcagcaattgcacgagtaattgcttgacgaatccaccaagttgcataagtagaaaacttaaaaccaagtttatagttaaacttatcaacggccttcatcaaccccatatttccttcttgaatcaagtcaaggaattgcattccacgtcctacataacgttttgcaattgaaacaaccaatctcaagttggcttcagcaagttcttgcttggcttcttcatcaccatcttgaattcgcttagcaagagtaatttcttcatcagcattcaaaagaggaactcgaccaatttcttttaagtacattctaactgggtcattcatccgaacacttgcaggtgcagataaatctttgagttcttctttttcaacatctttttgtttctttaaggctaagtttgatgggtcaccgtttgcatcaacgatactgattccattatcttcaaattcttgaaccagttggtcaacagccttgccttcaagcttgtatggcttgattaacttttcagtaaagtcggtttcagtaatctctttactctttttgacttctttgacaagttctttaacttttttgtctaaagtcatgtctgccattaattagcctccctaattgttattgcgttttgcattaatgatcatctctaaagtcttaagaacctgatcttcatcttgtctgcgttgtgcatcttgcaactgcatttgtaagttgctaattttccgctgattatcaagtctcttaagtgatgccaataaaccatcaacttcttctttagaaaagtcttctggcattgtcatcatttccatgttatctattataccctttaaatcatcaggaataaaatcatagaaactgttaattgtagcattatcatgtgtttcttcaaaatcaagccaagattctgctaacttagcataattttcgtctggaaaaaggaagtgtaagcctaataaataatttctaactttttcagaatgaacaaataaatacaacaaacgtacaagtgctggattagtattatgcagagttgccacttgggtcttactttgttcttctggttcaaaattatattgtttttttcttctttcagctacacgaagtcttcgcccttctcgcagcaagctaaccttcaacgagtcttcagaaactcctacttttttggcaagtttcgtcacataaaggtctcgttcaacgggattagttagtggagctattagcttaatcgcctcatccaaataagctaatttttcacggtcatttgaaaaattatactttaattccaatcgttttaagaaaaagtcagttggagtaattgcccctttaacttcatcttgataacgctcagggccatatttctttacatactcatcagggtcaagcccttctggtaatgaaactacaccaacttgaaagccaccaattgtttcaaacatatgacttgctctctcaattgcgtgttgtccaggttcatcaccatcgtaattaattataatattgcgactgattcgcttaagtaaatacacctgatcatctgttaaactagttcccatcgatgcaatccctgtcttaattccagccttataggctgcaattacatccatgtatccttcatataagacaaggtgcttttcggtccgaacggcttttttcgcttcttttaaatgaaataggactttagatttattaaaaatctctgtttctggactatttaaatatttggctaattctttattattggaaattcttcgacctgaaaagccaacaatatatcctacttcatctgctaaaggaaacattaaacgatcacgaaaacggtcaaaaagctgtccgctttcattttgagaaaagagcccacttttagcgagcactgtatcatcgtatcctttaccacgtaagaaagttaacaataaatgatcactatttggtgcatacccaatttggaaatgttcaagtaagtcttcagataactcgcgctcttttgcataattgagagcccgttcaccagccttactagttaacaaaacttgatggaaaaactcgcaagcatcttggtgaactttctttaaagggcttaaaggtttcgcctctgattggtagctacttggcattgctaagttagccatttttgctacttcagcaacagcctccggaaagcttaagctttccttatattgcataaaactaaagacattaccacctttaccacaaccaaaacacttgaaaaattgcttatcttcactaacagtaaatgaaggagtcttttcttggtgaaaaggacaaaggcctacatagtctttgccccttttttctagtgacacatattgacttattacatcaactatattgatgccatttcgtacctcattgataaaatcttctgggattcgtccagccaattgtatcacctctttcactagacttgtctttattttataacaaaatcaatttacttaataaccaacttactcaatgcacctaagcgagtagctaattcattgatttgactcaattgagccaagcggttattcttaactgcttcatctttggccataatcatattaacttcaaagtagcgatcaattactttttgcattgaaacaaatgcttcatataattcagttaagttatcaattgcttgtaagttttgactagctaaatataattcattttcagaattatcttcaaataagtcactcttaactacactatcacccttatattttgccttcttcaaaatattttcaattctaattaaactttcgacaactggcttaaattcaggtgaatcatgatgagcttgcaaaactttagctgcagctaaaattcgactaggatctttttgacttgagtgaagaacagcatcaattacatcatacttgtaattattagtttgtaagaattgcttaattcgatcacgaataaagagtgaaatttcttcatcttcttgactagtcttaggcattttagcctttgttttaccatcaagaagttcaaccatttttggtaaagccttatcaattgctagtgaccaattttcgttaagtaaaattcttacaattccatatgcgtatcttctaagtgcatatgggtcatttgaagaagttggaatcataccagcagcaaagaaagtaataatattatcaaatttatctgcaactgacaataatgctcctacttcactagttggtaattctccttcagctgtgagtggcatgtaatgctctttaattgcaagagcaacatctttattttcaccagcaagttcagcataatgcattcccattacaccttgaagttcagcaaattcaccaaccatttgagtaactaagtcaaacttgtaaagttcactagcacgatcaaagtttttaattacttcatcacttaggccaaatttctttgcaaggtattcaccaataatgcgaacacgaataagtttttcagccattgagccaattttatcgtggaatgaaactttatcaagtcttgaaacgaagtgactaagaggatatttcttatcttcgtcatagaagaattttgcatcatctaaacgtgcaactaataccttttcatttccactgataacattttcaagaaattccttattaccattacgaactgagataaagtggttaatcaacttgccatcttgatcataaacttcgaagtatctttgattatctttcattgatgtaatcaaaacttcatctggaatatttagataactttcatcaaaactaccagcaaatacagttggatattcaaccaagttagtaacttcctctagtaagctagcatctaacttaaccttccaattattttcagcaactaattggtcgatttggttgactatcattgtcttacgttctgctgcatcagcaataacaaattggctcttcaaagcttcttcataatcatcactgtttgccaaaataacgctgtcacctaagaagcggtggcccatagtcttacgaccagcagtaatatctaaaattttaacaggaacaacttcactgccaaataatgacactaaccagtgaattggacgaacaaattcaaagtcattgctgccccaacgcatctttgtagggaaagtcatggccttaataatatcgctcatccctaataagatatctgttgcaagcttaccagctttttgaacatgaacataagcatattcagtgccctttaagtcttcaaagtagatatcatcagtagtcataccttggccacggacgaagccttgtgctgctttagtaaaattaccttcactatctaaggcaatcttctttgcaggaccttttttaacttcatcaatatctgcttgcttttcagctaagtcttgaaccaaaattgtcaaacgacgaggagttgaaaaagtcttaattgccttaaattccaagccattatccttcaagaacttgctagtacgatctgctaattgctttacacttctagaaacaacatgagctggcatttcttcagtgccaatttcaaataaataatctttagtcattttcactctccgccttttctacttctgcgctcttaagtaaagggaatcctctcttttcacgttcttcaacaaagcattgagcaacttcatgggccatatttctaattcttgctaagtaaccagctctttcagtaacagaaacagcaccacgcgcatcaagcaagttgaatgtgtgactacacttcaaaatgtagtcatatgctgggtgaactaagttcttgccaagtaattcttttgcagttgcttcatatgtatcaaagaattgtaataattcttcttgattactttcttcaaaggcatacttagaatgttcatattctggttctttaaagatatcacgatataaaattccattaccccattcaaggtcaaacacactgttaacatcttgaatatatgaagctaatctttcaacaccgtatgtaatttcactcatagttggcttaacatctaattcaccaacaacttggaagtaagtaaattgtgaaacttccattccatcaagccaaacttcccaaccaacaccggcacaacccattgatgggttttcccagttatcttcaacgaaacgaatatcatgttcaagtggttcaatccccaaaacacgaagactatctaaatagtattgttgaatgtcaattggagcaggcttaataactgcttggaattggtggtgttggaataaccgattagggttgtcaccgtatctaccatcagcaggtcttcttgatggttcaacataacatgctgcccaaggttctggacctactgcacgtaaaaaagtataagggctcatagtccctgcccctttttcaacatcgtaagaaggcataatcatgcaacctttagaagcccaaaattgttctaatttaaaaatcatatcttggacatttaatttcttatttgtcatctaatttcctcctgtgcaaaggcataaaaaaagcctatgcaaaattttgcatagggacgaattaatcgcggttccaccctaattcaggaagctatcgtttcctgcgcttaattaagtcgactagaggtgccttttcctaggtgctctctcatcaaacagcactcgcttaactagtacttttcttatcctcatctttgtcaatatactatgacattttaccatatttttgtcaaaattgtgcaactaaatattaagtctccgcatctcatctaaaaattttttagtcttcaaatttatatcaactgtttgaaaataaattcggtcaattgcttttctaattactttcttagtatcagatttaacattgatttgtcccaaacgttctattttaattaaacccaatgttctaatcattgcaacttgtttatcatttaaatgcattcgcgctatttgattgaaatgcttttggcaaatgattccaccggcactaattgaataatcaaatgggccatgtgtttccccacaaatagcacactgcttcaattgtggtctaactccatagactgctaacatttgtaattcaactaactgacaaataatttccggatctactcctgcatttaatttgtccaaagctactaatatcaacttataaaaattacctaaagattgatattcaataaaggcatgatcaagcaaatcacacaaatagcatgcgtaactgtttagagttaaatcactgtataagttagtaaattgcttaacatctttatacgtttttaaagtactaagtcccttttgactagttaagacttgatattttccaaaagaaaaagctaaaacactcgcacttagttttgactttggccgcaaagcccctctaaccagcatagtaaaaatgcccatgtctttactaataattttagctaagacatcggcttctttatacctttgacgtttaaaaacaatccctgttacttcaacgacttctttaaccattaaaacaagtccttgctgtcatatccaatttgcttcaaaaagcttgggtcagttcgccaattcttttgaacttttacccataagtgaagattaattttctcacctaataaagattcaatttgcttacgtgattgaataccaatctttttcagcatactaccacctctaccgatgataatcttcttttgaccatcgcgttcaacgtaaatagtagcttctacttgtaacttaccattaattcgctcgttcattctgtcaacgacaaccgcagttgcgtgcggaatttcttgttgagttaagcgcaaaatctgctcacggattaattcagcaacaacgaaatattctggacggtcagtcacttcatcactaccataaaattgtggcccttctggtaagtacttgtataaagtagaaattaaatcttccatgttgttaccattagttgcagaaatcggtacaatttccgcaaacttgcccaatttttggtatgactcaattactggaagtaaggcgtctgggtgcacttgatcaattttattgataattaaaaaaacgggagcttttactttactaagtaaatcagcaatatattcatcacctttgccaactttttcaggttcaaccataaaaaatactaggtcaacatcatttaatgatgaaagactagccttatccatatagtcatctaacttgttcttaggtttatgaatcccaggtgtatctacaaatacagcttgtaagttatcagttgtaaaaataccagaaattttatttctagttgtttgaggtttattagaggtaataaccaccttttgaccaattaaatgattcatcaaagttgacttaccaacatttggacgaccaattaaggcaacaaagccagatttaaacttatttgtttctaccatcgactaaatctccatctgtaaagtaataaggtaaaatatcagcaagtgttgcttctttataatcgccttttgcatttgttaatacgattttagtatcagcttgcataaattcagccattacttggcgacaagaaccacaaggtgaaataggtcggctagtatttccagtgattaataaacacttaattggatcattggttaagccttgattaacatagttaaagattgccacccgttcagcacaaatagttgaaccataagcagcattttcgatattaactccagtagtaattttgccagattcagttaacaatgcagctgaaacatgaaatttagaatatggagcgtacgcagtatctaaatgttcaacggcaagatcatatagtttcttttcttctgaattcattactttccacgtccttcatctaattgatctggataaagtggcaagccatattcttctaggaccttgccttgaataccaaacatttctttagcttcagctggttcaatatggtcatagccatttaagtgtaaaaatccatgaactaaagtataaccaaattcgcgatcaaatccggtttcatattcttcggcgtgacgtttaattacgctgatgcacatgaataaatcaccgatgtcttccgtaaaatctggatcagaaataaagcttgccagatcaacaccttcttcgccatcttcaattgcaaaagaaattacgtcagttgggcgatccttatcacgataatcacgattaatttggtggctcttatcttcatcaacaaagttaatactcatttctaagttattttctttgccaatttcttttttagccatgaggagtaaatccataatccatttacgccaatcgcgactggtatcagctaaaaagttagtctcatcattataggtaatatcaatagcgtccattagtgtccttcttcttcataagctctaataatcttggccacaactgggtgacgaacaacatcattaaaggtaaagttaacaaatttaacttggtcaacgtcttttaagatatgcattgcatcaagcaaaccactatgttgcttgccaggtaagtcaacttgagtaacatccccgttaacaatcattttggaattaaatcctaaccgagttaaaaacatcttcatttgagcatcagtggtgttttgagcttcgtccaaaattacatatgcttcatctaaagtacgacctctcatatatgcaagaggagctacttcaattactcctcgttccatcaaccgattagtcgtttcagtacctagcactgcataaagagaatcataaattggtcttaagtatggatcaactttttcttttaagtcacctggtaaaaatcccaaactttcgcctgcttcaacagctggtctagtcaaaataattcgagaaacttcgccgtttttaaaagcactaactgccattacaacggctaagaaggttttaccagtaccagctgggccaatcccaaagacaatatcagttttttggatagcttcaatataggcttgttgaccagcattcttaggtcgaattggacgtcccttggcatctctaattaagactttattgtataaatcgccaaaaaactcaactgttcctttttcagccatcttcatagcactaactacatctggagctgcaatacttactccggaattgacaactttttctaaggcagctaatactttaatgacaagtttgactttcttttcatctggtgaatcaatcaaaataccatttccagtatcactaaccttgatgtcgtatccatcagccaataattttaaattagcatcattaatacccactaaactcataaggttagcaggatttttaggcgtaaatgtaaattgaggcatttaatcatccttttagtaaattatttagaaagtgctgcgccaactaatttagaaacttccttaccatctgcacggccagtaatcttaggtacaattgctttcattactttaccaaaatcagccttgctacttgcaccaacttcagcaattgtttcatctactaacttacttaattcttcttcagtaaatggctttggcatgtaactttcaacaatttcaagttctttttcagttgcagctactaagtcatctcgaccagcttttttaaagtcagcaattgactcttcacgttgcttcttctccttacctaaaacggcaagttcttgttcacgtgataattgattatcagaaagcttaccttcatccttaatagtggcatacattaaagcggacttaagcattctgattgtagctaatctttccttatcctttgccttcatagcttccttcatatcagccatgagttgatccattaatgacatttgaaaaaatccttctttcttggtgcaaaaaagctcccgacaaaaactattcgtcgagagctttctattaattaataatgtctacgcttgcgagcagcttcagatttcaactttctgcggacgcttggtttttcgtagaattcacgcttgcggtattcttgcaaagtaccacttctagaaacggaacgcttaaaacgacgaagagcatcatcaattgactcgttttcgtgaacaatagtcttggccatgtgagatccctccttccatttcttggcagtactgccataacaatatagttaaattatagccaaaaaggtccttatacgtcaatagttcttttagaaaaaatttcagagtataatagaactgaaagtataaatgaggtaaaaagttatggaaaaaagcaaaattgttaatatcataatcatttccgacagtgttggtgatactgccttcaacttaatgaaagctgcggcagcacaataccctgacgcagaagtgaactatcgtcgctatccattcatcacaacaatggaaaaattagagaaagtttttgatgaacttgatagttgcgagcatatgttaattggctatacccttgtaaatagtgatttacaattagcgactattaaatttgcccgtgaacatggtgcaaagccagtcgatattttttcaagtgtagttgatgatattcatgcaatgacaggacttgaaccttcaggtcaaattggggctagccaccagttaaccaagaactattttgaccgaatttcagctatggaatttgcagtcatgtatgatgatggtaaagatcctaagggctttttggaagctgatgttgttttacttggcgtctctagaacaagtaagactcctctttcactatttttggctaacaagaatttgaaagtcgccaatcttcctctagtaccacaaacacatatccctgatgaaatttatcaaattgatcctaaaaagattatcggtttaacaaatgatcctcaggtcctaaatgaaattagagtagctcggcttaagagttatggactagatcctgaaacttcttattcaaatatggacgcaattaataaagaattagcttccgcacaagcgctctttactaagttaggttgctatgttgttaatgttgctcaccgttcaattgaagaaactgcagcattgattttacgtcatttgggaattgaagatgaaatgtaaaaattaaaaatcgcatctcctttgaggtgcgattttattttattcatctaaactagttcctgttccttaaatcggccataaaccttagccacttcacttacactaacaaaggcatacggatcgcaagcaacaataatattatgtatatcatacatatcataacggtcaataatcgtaaacaagatggtcttttccgtatgaccataagctccttcaacatcatgaataatcgtaatcccacgatgcatcttttcttgaataccatcaataattttcttaggatgttcagttacaatcatgacttgcatcttttgatgctgggtataaacagcatcaattacccggccgttgataaaaatgttcaaagctgtataaagtgaccgagtccagccaaagacaaaaccagctgcaatcacaattaaaagattgatagcgatattaattgaaccaaaactttgacctgtcttcttacgcaagataatccctacgatatctaatccaccagttgagataccactcttcaatgctagtccagtaccaacaccattgattacgccaccaaaaatagcacaaacaagcggatctaacttccattctggagcaggtaaattatgcatcataatcgaagctagaaatactgcaataatcgtaaaaatggtaaacttcttaccaatcttaaaccagcccaaaataaataatggtacattcaaagcaaaatacagagttgaagtagtcaaagtaaatggtaaatacctctctgataaggtattaattagctgagcaaatcctgttactcctgaagaatacatatgacctggctgccaaaaaaaattcaaagccactgcaacagctattgcatataaaaatgccgcagaaatttttgatagtaaattataacgtcgtgagagtccttctagtgattccataaaaaatccttcttaaattagtaacacaactagtttaccaaatttagaaggattttgtttgttatttatatattttattaattattttttgaccagtgcttttcaatgaagtctgctctaccaccagcttcttccatcatgtatcgaagtggattcttttggtagaagtattggtgataatcttctgctggccagaacttttgcactggttcaattgcgacaacaattggcttatcaaattttccagaatcagctaattcttgtttagacttttcagctaaagctttttcagtttcatcattatagtaaattactggacgataagtttcaccacgatcttggaattggcccatttcatcagtagggtcaactacctgccaataatatgataagagcttttcataggacatcttatctgggtcataagtaatctcaactgtctctaagtgaccagttgtgtggctacatacttcttcataagttggattttctttatggccaccagtataaccagaaattacactcttaactccaggtaaagtgtcaaatggttgaaccatgcaccaaaaacaaccacctgcaaaaattgctttcttatattctgccattattttgctccttcaaataaagctaaatacttgccgtaaccttctttttctaagtcagccttagggataaaacgcaaagcagccgaattaatgcagtaacgcattccaccttgatcaattggaccatcattaaacacatgccctaagtgagaatcagcatctttacttcttacctcagttcgctccatgttgtggctactgtcgcgtttgtacactaccttttcaattggcttagtgaatgcgggccagccacaaccagaattatacttatctaaactagaaaaaagtggctcaccgctaacaacatctacatagattccttcttcaaagaaatcatcatatttaccagagaatggatattctgtagcagcatgttgcgtaacttcatattgctctttacttagctttttcaatgcagcttgtttttcatttaaatccataagaacactttcttttatatagtaggatactcaaaaggaacaaaaaagaccaagattttgctcatcttgatctttggtattttatttgctgaatttaacaatcttcgtaaacattgctcgttcttcgtcagtaaccttatgcgcaacttcaattacagcagattgattttgctctaaaattgtcttgtgaattgctaaagataattctgggtcaagtgaactggtagcttcgtcagctaaaatgattggtctttcagctaataaagctctcgcaatttcaattctctgaatttgtccacctgataacttattacccttttcccccacttgataatttaagcctttttcttcaatcaggtcttttaagccagcttgattaatcacatagtttaatttttctgagctaacctttctccccaatgtaatgttgtattctaagctatcatcaaaaataaatggtttttggttaatatatgaaaagtacgaatgtaactttttccagtttccagtctcatctacttgattaatttcaactttacctgaacttggtgcaattctgcctaacaggatactcagtaatgttgtctttccccaaccacttggagccattaacaaaactttatctttaggtttaacgtcaaaattaacattgtcaaacaattgtttatttggcacttcataagaaaggtttgatactttcaatgaattgaaatctgatattgcttcatttacactgtcatcgatcttaaagttaagtgcttcactgactttactccaaatagaatcagttgatttaatagcgttatacctttgaaaaatatcaactacaggattgataaagtcatttgaaagttgaattatcattaccaatgtgccagcaccaatttgattattgaacatcaaaatagccccaatcaaaaatggaataataaagctgaaaacattagcaatagctaaaattagttcacctactgctccttgcgtataattaaattttttgagagcaacttccatattggacgcactattaataattttcttaatcaaaactggttgtacatcataaagagcaacagttttagcaccgtttaaaccatcgcttaccttttgtgtgtaaatagcattattatcttcccagatttttgatttttcttgaatattcttagtaaagaacttctgaatgaaacctggaattaaggtggtaaccatgaaaattaaagtcaaaagccaagaatttattaagccaacagaaacagcaatgatgaaagttatcccttgataaataactaataattcattttgaattttcgcagtttccacttgcttcatgttattcgtcagcaaactcatgccatctttttgagaatctttttgattataaatcaaataagtcacaatatgcttctttaaattcagattgatatcttgaacaatatcgttttttaaataccgaaatccgaagttgataaacataattgcaattaatgtaagtgaaccaattgtagctgtcacaacaagtaattgcactgatccttgatgattttgagctgaatttaacataacttttgttacgtaagctataacaacattaccaagagaactaataattgctaagaatgtatatagaaacaacttccactttggtgcatatttcaatgaagtattcatactaccccctttttttacatgcatccctacttaaattttactatctcaaatcctattcatacaaagaaaatagcttgattctaaaaaagttttaactcaatttcaaatttttcgatatttcaccgaaagtttgaactcaactttaaactttaggcattttttctaaaagtttgaactcaattctaaacattttcaaaaagatataaaaaatagcctagttctatttcgaactagactattttcttaattattcatgatccttgatgtcagcttcagcttctttttcaagttccttttggttatcgtcacgaacacttcttgcagaagcagtaacttcaataccaagttcagccatttgttcatctgaaactggagatggagccttcatcattggttcacttgcacttgcagtcttagggaaggcaataacgtcacgaatgttatccttaccagttaagagcattgcaaatctatcaagaccaattgctaaacctgcatgtggtgggaaccccatgtctaaagcatcaagtaagaagccaaattgttcataggccttttccttagtaaagccaagagccttaagcatcttaagttgaatatccttcttgtggatacggattgaaccaccaccaagttcgtaaccgtttaagataatgtcgtaacttcttgcgtgagccttgtgaggttcagtttcaagaagcttaataccttcatcatctggcatagtgaatgggtggtgagctgcaatccattggtcgtcaccttcatcatattcaaataatggccaatcaactacccattcaaagtggtaatcatccttagataccatgttaagttcaattgcaattgaacgtcttaagtaacctaaagcatcacaacataccttccacttgtcagcaacgaagagtaataattctccacccttcaagttataaatcttcttaagttgttcagcttcactgtcagtaataaagcggctaactggacctgagaattcaccatcttcaaacttagcccaagccaagcccttagcgtggaaacgcttgatgtattcttgcttttcttcaatcttcttacggctgtatgcctttgctccgccttcaacagcgattgccttaacaaagcctccatcagcaatagcccctgagaagaccttaaagtcagaatctttgaagacttcatttaagtcttgaatcttcatatcaaaacgcatatcaggtttgtcgctaccatagtagttcatagcatcgttccaagtaattcttggaagtggcaacttgatatctacgcctttaacatcgtgcataaccttttgtaaaagacgttcagtaatgtcttgaacacccttttcatcaaggaatgaagtttccatatcgatttgagtaaattctggttgacggtctccacgtaagtcttcgtcacggaaacaacgagcaatttggtagtatttgtcaaagccagcacccattaataattgcttaaacaattgaggtgattgtggtaatgcataaaaactacctgggtaaacacgtgatggaactaagtagtcacgtgcaccttctggagttgacttacctaagtcaggagtttcaatatcaatgaaaccttcactatcaaagaattcgtgcacagcagtagtaatctttgaacgagtaattaaagctctttgtaaagttgaacgacgtaagtcaagataacggtacttaagcttagtttgttcgttagcgtttaagtcatccttgatttcaaatggagggttctttgcttcatttaaaacagtaatagtagttgcatcaacttcaacttcaccagtcttcatttcagggttaacactgcttctcttaacaaccttacccttaacttcgataacgtattcattacctaagctgtcagctttatccattaaatctttaccagattcatggttaaccacaacttgaacgataccttcacggtcacgtaaatcgataaagattaggttacccaagttacgaactctttgtacccagccgtacaaagttacttcttgatctaaatattggctggtaatattaccacaataatcagttctcttgtccatcgttagtatttatctccctaaaaatttttcatagcttcgctaatattattcatttcatcccagctaagcttgatttgcttgccgtcggctaaacgcttgattgaaacatttccttcggcaagttctttttcacctaaagtgataacaaattcagcatgaacacgatcagccttcttgaattggttcttaagcttcttttggtcaacgtcatattgaactctttgaccttgagcacgcaacttacgagcaagttcaacactttttaaagctgtaccttcaccaatattagtgataaagaagtcaattccactatccgcaaataattctggattttgcttttcaagaacaagcatcaagcgttcttcaccaatcccaaaaccaacagctggtgtttctgggccaccgaattcttcaactaagtggttgtatctaccaccacctaaaacagttgttggtgaagcccataaatctgtatcagctaccataaattcaaaaataacgccagtgtaatagtcaagcccacgaactaaatcatcatctaaaacatacttaattccaagcttatctaatgcatcggtgatgaacttaaagttcgcttttgattcatcatctaagtaatcgacaattcttggtgcatctggcaagaattgcttatcttgttcttcttttgaatcaagaattctcaatggattcttcatcaatcttctttgtgaatcttcagataattgatctttaactggggtaaagtaattaatcaaggcatcgtggtaggccttacgaactacttcattacctaatgagttaatgtgaagttcaaaattctttacaccaagcttatttaataagtcatttcccatcatgatggtttcaatatcagctaatggattgtttgaaccaaagctttcgcaaccaatttggtggaattcacgttgacgaccagcttgtggacgttcatatctaaacattgattcaatgtagtaaacattaaatggcttaactacatcaggaccatacattttgttttcaacgtatgaacgaactacaccagcagttccttcaggacgcaaggcaatgtgacgaccacctttgtcgttaaagtcgtacatttctttttcaaccacgtcactagtctcaccagatgagcgtgagaagacttcgtagctttcaaagctaggagttctgatttcacgatagtttgcttgtttgaaaaagtcacgtgcaatttgttcaactttttcccaattacctgaaacatcaggcaaaatatcaactgtaccttttggcttttgtaccttcattaactacaccctttttataattaaatttgataaataaaaagagcgcctggaaataaatccaagggcgctcaaatagcacggtaccaccttttgcttgctacgattaacgctcgccacacgaaccattatctgctaaaggggtcacagattgctactctatgtccttgcaccaaaacggacactctctgaaaataagtttcaatcttcaattcttcgtcattgataattcttttatagcttacttttttctgcgcttaaagtcaatactaatcaaggtccaaaacaatagtgaaagggccatcattttcaagttcaaccttcatatcagctccaaaatgaccagtttcaacatgaaagccaattttttcaagttcatgattaaactcttgccacaattcatcagcctttggtgggcgcattgccttaacaaagcttggacgattacctttttttgtatctgctaacaaggtaaattgactaacgctgagaatttcaccatttacatcagctaaactcaagttagttttaccagcttcatcttcaaaaattcgcatcttggcaattttttgagcagctttagcaactacttcttcattatcatcttggccaataccaactaaaagcaaaaagcctttcttgatttttccaacaacttcattatcaattgcaacttgtgcatgatttactctttgaattacaactcgcattaattatctgacctcttagttgaatatacatctggtatatcacgcaagcgactcaatgcttcatttaattgctgagaatctttaacggtaatagtaacgtaaatatgcgcaatattttcttcatttactttaccagagatattcttaatatttttagttagactgttcaacttattaattacatcactaagtaaactagagcggttataaccgaaaatttcaatattggcgttaaaggtttctgtacgttcgccaacattttcccaatcaacgtcaattaagcgaccttctttagctgcttcatcagttacgttacggcaatcagtccggtgaattgtaactcctctacccttagtgacatagccaataatttcatccccaggaaccggattacagcatttagctaaatgaagcatcaagtcactaacgccttgaataacaacaccattattgtgcttcacatgcataactgcacgattcggagtaatattctttgtttcctcagtagtagtttgaccagcattaagaattttttcttctaattctttttgctttttattttcttcttctttacgtaaatcttctgttaaacgattaacaattccaatcgcagaaacttccccataaccaacttgagagaacatttcatcttcagaatgatagtttaattgattaagtagcttttgaatgtggtctttgtcaaggtattccttagcactcaagccacgctctctaagtaagttagcgacgtcattacgacctttttcaatattttcatctttacgttgttctttaagaaaacgtctaatcttgttacgtgcccgagaagttttaaccatatgaatccagtcaggagatggttctgcattagactgggttaagatcgaaacgacatcaccattttttaggcggtaatcaagtgggactaacttgtcatttacttttgccccaacagcatgactaccaacttgcgtatgaattgcataagcaaaatcaagtggaactgatccttttgctaattcataaacatctccttttggagtaaagacataaactgaatcagaaaaaatatcagattttacactcttcataaactcatcagcgttactagtttcatcttttaattccaaaatttctcggaacatatcaagttttcgaccagcacttgtagcttcaactgcctgagtatcaccttttttataagcccagtgtgcagcaaccccatattcagcaacttcatgcatttgctgggttctaatctgaatttcaagtggcttaccacctgggccaataattgtggtatgaagtgattgataaccattggccttaggaacggcaatatagtctttaaatcttcccggcattggcttccatttagtatgaacagccccaagtactgcataacaatcgcggacattttggacaattactcggacagccaataaatcaaaaatttcactaaaatctttatgtttattaaccatctttttatagatggaatagatatgttttgggcggccataaatatcatatttaatatgcaagccatctaaggtatcttttaaatatgttattgcagtatcaatatatccttcacgttcgctacgcttagaattcatctggttaacaatattgtaataagcttcaggatttagatagtgcaaactcatatcttcaagttcccacttaattgtcccgatacctaaccggtcagcaagaggagcataaatatctaaagtttctgaagcaattcggcgttgcttatctggacgcaaatggtcaagggtatgcatattatgcaagcgatctgccaacttaaccataattacccgcaaatcctgtgccattgcaatcaacattttacggtgattttcagcaagaaattcttcatgtgacttatattcatacttgttaagtttagttacaccatcaacaataaatgcaacatcctcgccgaattcacgcttaatatcatcattggttacgggagtatcttcaactgtatcatgtaaaaatccagcggcaactgtgtctggatctaaccctaaatttgcgactgtcccagcaacttgagttgggtgaataatatatggttgtccacttgctcttttttgacccgaatgggccttttctgcgtattcatatgccttttctacaaaagcaagttgttctttattcatatactttttacatgcagagataacctcttcatgagtcatttcaatgtatttagacatcttactcacctactccaaaatttagtttttataaagattgccctttaatgagccaaaaaattccataattaaataaacaacaattaaaactaaattatacttagcatatcgtgataatacaactaataagaatacaattggtaaaaataatagccaatattttctaagatttctatcagtaattaccttacccacttggtaactaattaagctattcaaaacaatgaaaatgaagcctacgcgccaagtcagttttatttttaataaacttgatccatatgccaaaagaactaataataaagtccaccaaatcactggcataaatgaataattatttaacttttttatccagcttgtttctaatattttatttttggccagctgtaattttgccataatatccaactctttctgtcataatttcttttaattctagcactttaatcaggcttacgctcaattaagagacaaacccagcgtccttcttgcatagtagtttttacagagaatccgttatcggctaagcgctgcttgactttttcagcttgtaaataatcaattcctgaaaaaataactttaccatttggagcaagatgcttatccaaatcaggaattaagtcaaacaaaatttctgctaaaatattagctaaaattaaatcaaatttaccatctacgtcttttaataagttcgcctttatgacttcaatattatttaacttattaagggcaatattttcattagctgctgttacagcttcatcagaaatatcagttgcaagaacactcttagcacctaatttgctggcagcaatcgctaaaattcctgaaccagtccccacatctaggaccttaaccggctttgttagactgcgttcaagcgccatcataaccaattgagttgtagtatgtcctcctgtaccaaatgcaagacctggatctaatgtaataactttttggtcaggaaattcaggttgataattttcccattcaggaacaattgctaaatgacgagagaaattaaggacatgataatatttttgccagaccttgttccaatcttcatcttggacatagtcatagctaatctcttttttaccagtatcaaggccgtaagattctagttctgccaacttgcttttatattgtttaatcaaatcatcagggtcacgttcttgatcaaaataagctatgaattccatatcttcgggtaagttttccatatcattaaagtcgactacagtagaatcatttgcccagccagcttgttcaaaatcactacgttttctagcttctacccctaatgccttaacttcttcttggctaaaataagttaaagcatcttcaatttcatgactagtttgtaattttatcaataataatttcattaatcagactccattctatttttgacactacgtttgaccatgatatgatggtaaaggtgataaaaatgtcaaagaaacgtaaaaaagataaacttgaaaaaacattagttgaaaaaattctcgatcgagaaaaagtcccatacgagcaaaaagaatttgaaacccatgaagagcatggtgtctttcaaatggatacttctattttagaacaagaccaacgtctggtctacaaaacgctcgcttgtgatggcaataaaactggcccacttgtcgctgttttacctattactgaacatttagatcttaaaaaattagctaaagtttcaggtaataaaaaatgcgaaatgttaccacttaaaaagttggaaaagacaactggatatgtccatggggccaacactcctattggtattcattttaatgaccattatccaatatttcttgataatagcatgaaaaatgaagataagattattgtttcatcaggtaaagtaggccgaagtgtccaattaaatcctctcgacttacaaaaagtagttgaagggacatttggtgatttgctagaaaaataatcactaatatctaatataagaaaaacaagagttatcgtgaagataaactcttgtttttttaatagtctttaattttatgaggcatgacgccacttgctgtctgtcaaaattcttgcagcaattaagccaagtggcaaagcaataacaatcataattgcttcagtagcccaatatgcacctaaacttatccgggtcaagcctaaattgaaaactgcccgatacatataaagtccaggaaccatgataacaactgatggcacagtaatagctattcgtggataaccaactttttcacgaataaatgaagctaatagtcctgaaagcaatacgccaacaaatgcggctagggcaggtggcatatgaccataatcaaccaagctcaatcgtaaagtattcgagatagcgccaatcacagctgttaaagcggcataattaattttagaattgaacatcaagctaaagccaaatacaccacaaaaactagcaattaatctaaaaatcgttaaattaattggtgttagacctaattttgtcatatctccaggatgaattccaattaacaaagcagttgcccaacctacagtcgttgccacaataataattaatagcgcataagccattctttcaagtcctgatcgcatatctaatttagacaagtcaagccctgctgtaataaatggaaaaccaggaattacaaaaagcattgaaccaatatatccaaaaatatgactagaacgaatatcaaaaataaagtgtaatagctgaaaggccaagaaataagttacacaagccacaaaaactgcggtcgcaaccttggcaaccattgtaatatgcttttgtcccatcttcattcgtgtgtagttcccacaacctgcaccaaagaaagcacaaattatttcaggtaagcctccacctagtaagaaaataaatcctgcacaggcaattgcagcagctagaccagcaatcgcaggagtatatcggctctttaaatgctcgatttctcctaatcggcggtgaatttgaccaatattccaatttccatcccctgcttcgaattgtctaacaaaacgttccaattcattaagcttggtcatattaaccccggttgctggaagagttagggtttgactgtaagattggttgttaacatcaaaacaagtgcaatcgattgttagtaatccaatatcagctgaacaagtaatatctaatgcacgagctattgtattcattgaatcacgcactctccaagatccagtcccacaacttaaaatcattaatccaactcgtccaacaatacttgctttttctacaagggttgcctttttggctagtgtttcatccttactcttaaagaattcttcccattgtattttcatatggtgagaattcgataaatggtgtcccatatctactttatccatttcctttaccattaaattataccttcttccaaggccacaaaaatcgttatgattaataaatcagcacagccacctagactgtagtttctttcagaaaaaaggttgtcaagatttttcaaataggctaaagccttattattttttgctccacccaaatcaagaaaatgttggctccatttttttaactcagttaatttatctaaatctcctgctcgcttaataaagtttgaatcctctgttacagttgcaattttcatcaaggtatcaattaacctctcattaagagaacctgtagtctgtttcaaaaaaggaagagctattttactaattattggatatcccgcttcagcctgcccacgaataccagccttgccatatttttgatattcaatttcacctgcagtcttagggacttttacatttgctaagtcatgttcaactaagccatgcgtcattttctgaatagttttaaaaacatcgcaattattacttattgaataactataagcacaaacaaaaatccctaatgagaaaactgcccctttatgagtatttatacctttagtgctagcaaacatttctttctcagcttgtattccaagaatacgaagctgttcaaacaaatttgatagttttccattatatctacgacccaaatcttctgcattttcaaaataagtacgtaaactcaagctactatcaataaaggtataaacatccatatcaggatgcgagctatgagtaactggatcaactaatcccggctttggccaagttactacttcatagagtaatgcctttatggccaaatcagcatgtggatatttcacttgcatcccttctctctactcaataactttatcattttaacatatttcgctcagcatatattttaaaaataattatagtaataaaaaaataggcctatgataggcctatttctgtacggatatttaattattttcaatattaagcattgtaaaatatttttctatatgatgcaagcttaatctttaacttctttaatagtatcaattacagttccatcacgatattcaatgacagcaactgttctgtcagtatattcaagtttctttggcgttcccacttgtttttcagcaagttcttgtaattcatccatagttactaagtgaatgcttggtaccttcttgaagcagtcaattaagtcttgacgcttagggttaacggcaactcctctttcagttacaacaacatcaattgagtcaccaggtgttacaacagtttcaacattcttaacaactgttgcatttctacctctaactaatggagctgtaataattgtcatcttagcgttagcagcatcttggtgaccaccaattgcaccacggataacaccatctgaaccagtcataacattaacgtggaagttagtgtcgatttgaagagcagacaaaatagcaacgtctaagttgtttacaactgcacccttgttgtgaggatcagcataccatgaagcatcaatttcttgttgatcacggttcttagccatagaagctgcagcacccttgtcaaagtcttgcacatccataactttcttgactaaaccttcttcaagcaagtcacaagttggcttagtaataccacctaaggcaaatgatgcagtaatacccttatcaagcattgattcacgtaagtatctagttacggcaagagcagcaccacctgaaccggtttggaatgagaacccttgcttaaagtatggtgagttaacaattacatcattaaccatttgagcaatcattaattccttaggatctttagtgaaacgagtagcacctgagccaatcttgtctgggtcaccaatttcatcaactttgacaacgtaatcaacttgagtttgcttaattgatgctggggtgtttggatatgggacaacattatcagttaataaaacaaccttgtcagcatattgagcatccattaaggcataaccaagtgaaccaaagactgccttaccatcttgaccattggcattacctgcagggtcagaaactggtacacctaagaaggcaacatcaatcttaatttcgccatcttcaattgaacgagcacggttaccgtgtgaacggaagataacaggattcttcaaaccaccgtgggaaacaaagtcaccaagtgaaccacgcatccctgatgaagtaatgttagtaatgacaccttttttaatagcttcaataaccttatcattcataacgccagttaatgatgatggagctaaagttaagtctttgtaacctaacttgataatcacatccataaccttgttaaaagcgtaatcaccatttctgaagtggtggtggaaagaaatagtcattccatctttcaaagtagctttaacaacatcttcaattgagtcaacaactttgttttcaccagcagttacgtgaaccttaggtgcaactctttggacatcaggatgaccaatttcaactgattcaaaaggttttaagttcaatttttctaaaacatctgctggcatttcgcgtttaatactattctccaatgtagttgccctcctcatcaattaagttagaagctttggcagtttctaatactctgtttgccttgtcaacgattggcttatcaaccatcttaccgttcattgaaataacaccgctacctttagcacgggcttcacgaatagcattttggacattctttgcattttcaatctcttctttagttgggttaaagaccttgttaaccattggaatttgtcttgggttaaccaaactcttaccatcaaaaccaagttggtgaatgtaatttgtttcacggtaaaagccttcagtatctttcatatttgagaagactgagtcaaatgcgtagattccagcagcacgacatgagtgtaaaaccatgttacgagcaaattccatttcacggccatctggataacggtgagtgtgcatatctgaagtgtaatcttcaccagataaggccattcccatcattaagtcagttgaagttgcaatgcttggtgcatttaaaacgcccttagcactttcaatagcggccataacaccaattgaacctttttcaataccgtattcttcttctgccttttccatatcagcaattaacttcttgatcatgtctgctgattcagtcttaggtaaacgaattacgtcaacaccggcttttaccattgccttaacgtcttcttgataaaatggagtatcttggccgttaattctaacaacaacttcacttccaccgaagtcaacagtcttaattgcttcataaacaagtaatcgagctgcatctttttcagttaaagaaacagagtcttctaagtcaagcataattgagtcagcaccataaatgcctgcatccttaatcatggctggattgttgcctggaacgaacatcatcgtccgacgtaaacgattcttgatataagtcatttatagcacctccaatgctggtttatctgtggtttgagtcgctctttgagcagcagctaaagtacgagccttaattacacaatcaagggcacctttatcaacggccttaactttggcattagttaagccaaatgatttcaaagtatctgtaatcacacttctaatttgatcaccatatgcttttgcaacatctgattcaagagtaatttcaattccattactaccattcataatcatgatttgaatgtcagatgattctaaagtaccagctactgctgttgtcttaatttccatctatcttcattccttcctggattcgtttttgtaattcttctttatttgctttgataaattccgctgtggttgccggaaccaagtcttcgatagcggcaaggtcgtctatcttaattaattgtcgaaccttcgtagctgtaactgttgtatcccctttttgaagccgtgggattaaatgtaagttaattcctggttcaagttcacgctttaaactatcattatagatgcttgttgcatgagaaaaaggttcagttccaacgtaacgatgtttaattgaaagtacaggtgcaatcacatttttaaagactcttgcatcaattgtggtttgattttcaattaaagtatcagcactctttaaaaagtaggcaggaaaagttgcagccgataccatatagctatcgccactgacaacatagacattcttaaattcagcacagccctttttaactagttcaaaacgctcttttgaattaaacaatgacatgtcagttgctactacaaagacataaaccaagtcattttcttggctagccttttggactaagtatcggtggccaaaggtaaaaggatttgcattcatgacaattccggcaacctttttctctgcttgatttgtaatctttggtaaagaagccaaatagtcatgaacatcaggactaccattttctaaaaaagcagcctcatcggttctagctaattcactaaaacctaaatgcttaaaactatcagcatatttcaccttggtaaaaacaaacatatgaaaaatttgttgagtgaaaagatactggctcaatgccgtaacaatcttattaaaacgttgtcctagttcactatctttattgcaaactgcaatatactttaatacgttgccagcaacacttcctgttccaactaaattaccatcttcatcaatcagacctaaagtatgatcaataacggcaacttctctttccgaaaaattatgcaaatctaacttttctaagaaattaatccagcgttgtttggtagctggatcacttagataaagatcaacaactttatccaatctgctgcctcctttcccttgtgcaacaattaactaagttacaatgtaagtataattctttattttaaaaatttcaaattaatccttatatttttaaaaattaaaaatatctgttacaattaaaaaagttacaagaaaaaatttttctccataagcgttataatgaaactaatagaaattaagtgagatgattatatggtagaaagttacgataattcccaacttgctgatattgcgcgtgattattatctaagtaagttaccaattacgcaaatatcacaaaaatacaacctttcacgttacctaatcgctaaagctcttgaagaagcagaggcaagttgtgttgttcatatcagtattaaatcaagcgtcaaacgtaataatcagcttgaaacgaaccttagaaacttatttggcttaaaggaagccttcgttttgaaagatcgagatacaactagtcatgataatgagcaaatcgttgattttgcagctcatcaaattcagaattattcaaaagcagctaatgaaattggacttacttggggaacaaccgtcctagatacgattgtccactttgatgaaattaaacgtcccgacttatcatttgttcaattagctgggatgagtttaagaactgatacacctcatgcgaactattcattaattcaacgtgccgcagaaaaatttgaagctaaatcatatgttttaccaattcctttatacatacttaatcaaacagcccatgatttaatggaaaaagagcctgcaattgaagagttacataaaaaataccaacaccttgacttagtctttactggtgttggtacccttgcaagtatggaatctaatcgtgtttggggcaaattgcaagatcaaattttctctggagttgatcaaaataaagttgctggtatgatttttggtcgtgcatatgacattaatggacaaatctttgaaagtgttgaggccaaattatcaggtattaagcgtgaagatttgttaaatactccaattcgttttgccattgtaaaaaataagttcaaaacgcactcacttttaggtgcgcttcgaactcatttgattactcatttagttattaatgaagcaattgcaaataaacttttacaagaagcagaaaaattcaactaattacaagccattcttcttaagaaatgagaggatggcttttgttgtctcttcaggtttttcagcttgcaaaatatgaccgcattcgctaatgacatgactttcaatcttatcattaatataggtcatggcctgtgcaaattcacaattaaagtatggcgacttctcacctgccaagacaagtaacggaattgataaatccatcaccacatcgcgccaatcttggaaagcatggtcgcacaagaatttgtaattggcctcttcatcatagggatgctcttgccgctcaagcttaacaggagtggcaatatcaggatcaactctaacatagttagcatgaactgtatcatgatatttcaaagaaattggaaaattatcccagtttaagtcttgatagccaaagttccagctgtcatcattaatcatctttggtggttggtctaagtcaaccatagcagctagtcttcccttaccaaataaagacgcataggcaaacaaggtgcttgcccccattgaattacctactgcaattacattatttaagttaagactagctaaaaattcttccaaatcaagggcatgtcgactcattctttgtcccttataagttcgttgactcaggccttgatttcttggatcaagtactaatacccgatacttatcttgcaacagttcaaccattcttttaaatagttgcccacttgctccaattcctggtaaacaaactaaagccggtaaatcagtttgagtatctgtatagtgcagagtcacgtgatcacttgttttaaattccataattacctcacaaaaaaatgactagcattactagtcattctaacatttatttagctacaccagctaatacttcttgcatcttgtcagctgaattcttcatcttgctcaattctttatcagataattcagcttcaattacatgactgataccattggcattgattacagttggagtacctaggtaaaggtcgtgtttgataccatattgaccagtaattggggcagaaagtggtaagcaaatttctttattttccaaaactgccttcacaatttgagcaagcatcatggcaacaccatagaaagtagcacccttctttgcaatgatttcgccaccctttttacggacgtcactttcaattgcagttaaaacttctggtgtcatttctgaatatgaagttaaagccttaccagcaacagttgcttcatcgaagttttcaaatgaagtatcgccatgttcacctaaaacataagcattaacatcttcaaccttaacattaagcttcttagctagttcaacacgtaaacgagctgagtcaagtgaagtaccagtaccaataactttgttcttagggaaaccagataacttttgggttaaggtagtcaaaatatcaactgggttagcactaacaacaaaaataccattgaagccagaatcaacaactggcttaacaatactctttaaaatcttaacgttcttgttaacaagatcaagtctagtttcacctggcttacgtggaatacctgcagtaattacaacaatatcagcatcttttgcatcgctgtattcaccagcatgaacattaacgctaccagtaaatggagtgatgtcttctaagtccattgaatcacctaatggacggtctttcacaacgtcacaaattaccaattcatctaagttagtgttttgcaataaatcgttagcaaaagttgaaccaactgcaccgtcaccgactaataaaactttactcattataaaaactccttatttactataattaatagtttcctgtaaacatattgtctgccttaggtggaacataatccccaaagtacttagtgaagtccaaatcaaggtattggcataagtcataaacttcagtcatggtcttatcgataactggaataccattttccttacggtctttaattgcagccatttccttttcaccatgagtataaatccgctcttgaccagcagcctttggcgcgtcacgcaaagcttgtaaatattctgagaagtgcttcttaattgcttcaggttcaccaaaacttgctaaattaatagccataaagccgtgacaagtaccagccttaccatctttcataaccaagtcactagtcaaaccttgtgacaaaattgatgaaaagatttcggcaaccataccattaccataacccttgtgtgagccaagttcttcagtattgccaccaagtggcataattccaccgccaacgtggccaacaatatttgacaaaacttcgccagcgttattggtaggttgaccatctttatctaaagcccagccgtcaggtaacttcttgccaagcttattgtacatttcaagcttaccacgagtaacaacagtagttgaggcgtcaaataagaagtcatatggatcagctggaacgcaccaagcttgcggatttgaaccaatcatcgcttttgaagcataagttggaaccatgattgcttcactgttagtacatgagaagccaagcatattttcttttgcggccattttggcataataaccagcaattccgtagtggttagaattgcgaacagtgacaattcccacaccaacttccttagccttcttgatagctaaatccatagcaaagtgaccattaagttgtcccataccattatggccatcaacaacagctgaaattggagtttcaaagattacttccggttctgcatctaccttcattgtacccttttgaattcctttatagtaacgaaccattctttgcattccgtgactttgaattccatacaaatcagctgttaataatacatcagtaataatacgtgctttctgttcattaaagcccaacttttggaaagcatccatacaaagcatgtttaatttatcgtaggagaattttactttctttccttcagccattttaaagcctctttcttttctgctacatttctttcacatgctaaatactaacacttgtttttaaaaattacaaataattgcatatttttttaaatattcaaaaagataattcttggataattaattcagaaatttgtttttgtaattcttctactgaatgtgctcgtgaacgagcacattcctttgctggctttccacaaattaaacatcctcttcctaatattcctaattcagcacgacccaaatcctttatttgattatttttaaaataatgtacatctaagtcaaataatcgtcttgctttgttttcttgttcgaaatctatacaatactccttaacattaacaggtttttcttgggctaaataaaaatattcaggtccagttttctttttcaagaaatttccttcaagagtaagaacaaaaggggcattactttcaaatttaaccaattcatatttaaaaaagttctctatcatcaagttgttcttaattggaccaggaatatttaatttagccccaataattgtccaattcttattttcaagaactaatttattttgtaattctaccctttgatctttatttttaagaacatcgtaaattgttacagattctccatcttctaaaatattcatcattttacaactcctagcgttcataataaaaaaggattctatgaatcctttttttattttcttatcaagtttatttttactgaatttcgtttatctagtttataaactaatttagcaactatgctaccttttttaactttattttgctcttttactattaatttaggagttaaacttgataagttttgttttttttgaagccaaagggcagaatccttttcaggtacaactgaaattttctttttttgttttttgctagtaattgttatcttttgatactttttgggtaagttatttttatcaaccttaactaactgatatttatcaaatactgtatcaatcatgttattagtttgaataaattgattactatattctcctggcacatctaagactactgtgattactctacggttatcaaaagttcctgttcctacataacaatagccagctgcatctgtttttccagtctttagtccatccatagtaccttttttaggaccataacccattccttctagcatatagatgatattttccatcttcatttcattatcttgcctaattttaaagtttgcatacttagttttagtaatgtttagaacttcaggatacttatctatcaaatatttggaaaccaaggccatgtctttagctgaaaactgattttcttgattatcatcaattttaggtagctttaagtcgcctaattccccatttgataagccaatcatgttataaatttcaggatttttgacacctgctctttttgcgacaactttcattttgtaattaaaagcagctacactaccagcatccgctagtgctaaagcctctgtactgccatctgctgaaacaatcatcatagattcaatgagtgaacgaacagtataccgttcattataaactaacggaacatttgaaaagtgccaatcatctgctacttttgctacatctttactgatttgaatttcttgatcccaatcgagtttatgcttatgaatatcttccattattaccgctaacgtcaaaatcttagttaatgaagctacagcatatttcttagttgcatttctttgatacagaatctgccctgttttttcatccatcataaaagcagctttcgcattaacagactgtacgtcagcttttacaatattgaaaaaagataaattaattatcccaataatccaaagtactactatcccagccaatcccaacttatcccaaaatcttttcattatcattctctttctttgcaatacttgtcatagtaattaattttactatatttttacttatttgaacaaaaaagtaagccataccaagtatgtcttactttaaaaatcaattaattaccataatccagctttcgtgaccaactaatttagaaatagtatctgaaagccatttaatgaagccgaacttagttaagcggtttgccatgtaaactaaaattgaaagccaaactaatacgttccagccacccttttcagttaagaagtcgtcgtttgataaaacaccagtaagtaaaagaagtgacattgaaataaaggcaatcaaagttgcatcaagtttaattgaacttgaaagcatccataaaattaaagttaagaggaatataccagccatgcacatttcaggagctgataacttacccatcttcttcaattctgcactagcccattccttagcattaggtgtttccttaatttcaggaccatacatcttataaataaagaatgggacaaccaataaagcaataagtgcaggaacacaagtagcttcgaaccagccaatccaagtgatgttaactcctaatgccttagctaattcaacagcaactaagttaggtgccatcgcagtcaagaaaagcatagaagtaattaagttggcatggaattcaacgaaagttaaaaatgcccccatcttcttacgacttggatcgtttggtttagaatcaaaattttcagctaatgattctactagtggaaagacaataccaccagcacgagcggtgttagatggagttgcaggactaacaactaagtcaattgcagcaactgcataacctaaacctaatgacttatgaccaaaccactcaatgaagtaaaaggcaattcttttaccaagaccagtcttaatgatacctcttgataacataaatgccatcgcaatgagccaagcagcagaatttgaaaatgctgttaaagcagatgcgtcaacagtatgacctttaacaattacatccttaattggagctaaacctaagaaaacagttaaagtgtaaccaattaaagtagtagcagcaattggaagtggcttaaaaatacagcccataattgttgctaagaaaattgctaacatgtgccatgcttgtacagtaactcctgcaggacgaataggagtcgtgaaccagaaaatcaaaccaacaataattggaatgatgaagcctttatagttcaccttttccaaatgtttcataaaaaatcctcctgggaaaagttcttcccgttaacaaactcgcaaagtagtaagtggttcttcgcttgctaagcattgcacaattattatacactattttttgctttatttttaaatattttaaaaaatatcctattttttcaactaattaaacgttttcaacaaatatattatgatagcgattttttatagttaaaagtttcacattcataaaataaataagagcaattcaacttataaaaagtgaattactcttatttaaatattcaaataaacttaaagaccaataattttcatccaaataccaccgattacaccataaaggacaagataaaacaaacccaaaacaaaactcattttccaccaatctgtttgcttaacataaccagatgcaaacaaagctgtagcaggcccacaagaataatgcgttgttgattgataaattgcaccagtaattccaagcatgatagctgcaaacattactggcacaccctcgccttgtgcaataagtaaaaatggagcatacattgcaacaacatgagctgttccactagcaaaaaagtaatgtgtatagaaatatactaataccaagatagccattactagcatgggattcatccctttaatggaatgcttaataaacaattgtaaccaatggataacaccaccatggacactcaattgactagccataaaaattaaaatcgagaaccaaacaacaacattccaagcacctgtttcatgcaacaaatcatctgttgttaaaattccagaaagtaatagtaaagcaactgccaagaaagcaactaaagttgcatctaatccaataaaacttgaaaccatccataaagccaaagcaagcacaaaaattgtcagcatcaacttttcagctattgtcatcttacccattttttcaagctcatgatccgcccactgcttagcattaggggtttctttaatttctggtggatacatcttataaataatgaatggaacaactaaaaacgctatcaaaccaggaacaagtgccgcaaataaccattcaaaccacgaaatatgaacgccatttgcttctgcaagtccgactgctgcaacattttgggccgaagctgtcataaaaaaagaagatgaaattgtattggcatgaaattcattataaaccagatatgagccaattttcttttctgtaccatccccaacctttgagccaaaagtctcggataaagattgaataattggtaatacaataccacctgaccgtgctgtattgctaggagttgcaggtgcaactaataaatcaattaatgaaagtgaatagcctaatcccaatgtttttttaccaaaattacgtacaaaaattaaggcaatccttcttcccaaaccagtttttacaaaaccacgtgcaatcatgtatgccatggcaatcatccacggagttgaatctgcaaacgcagtaagtgcaaatttcatcttgactaagccagttagcaaaattaagacataactaataatagcgactccgacaatggggagaggtttggtgatacatgcaataattgttgctaaaaatattgcaaacaaatgccaaccagaaacactaattccagttggtctaactgctgttagaagccaaagtaagactccaacaacaactggcacgataaacccacggtagtttaccttagccaaatttttcataaaaattccctcctgataggcaaatgcctatttccaagtacgagccttattcgggttcgccagtattgattggcctctttattttacttttttcaaatttatctttgttttttaacttttataaaatatgatttttaattttcacggataaacttggccatttgaatacctgcttgacgaccgaaaataacagtttcagcaattgagttaccaccaattctgttgtttccgtgaagtccgccagatacttcacctgcagcgtaaagaccagtaataacattaccgttagtgtcaagtaccttggtttctggagtgatgtggataccacccatagtgtagtgaattgctgggtgaacgtgtatagcaaagaatggtcccttttcaattccacgatccataccagtagttctaccaaattcactatcatcagcagccttaactgcttcgttccaagtctttacagtagcttctaagttactgctatccacgccaatttcactagctaattctgctaaacttgcaccatgcttaactaaaccaattgcatcgtagaattcaaccgccttaacatggtcacgaataccctggtcaaagattaagtatgcaccatcttcatttaagccagtaattgcgtttgaaacaatcttacgagtgttaagttcgttaacaaatcttttaccagcacggttaactaagatagcaccttcaccgcggacagcttccccgattaagaaggtacgggcaccatcagtttgagcagttgggtgaacttgaacatattccatttgcataagttgagcatcaactgcttcagcaagtttcaaaccgtcaccagtagcacctgcttggttagtagtcttgtagtcaactaagtcgggacggtatttcttcatcatttcttttgaagcaccaaaaccgccagaagcaagcaaaaccgccttagcagcaactttcttaaggcctgattctgtttctacttcaataccagtaacagccttaccagtttgaacaagcttagtaaccttagccttgttgaagactggaatatcttcttcttgaatcttcttaagtaaaccagtaactaagtagccaccaactggagccattgaagctggacggtgagcacgctttttgctcataccaccagtaatggttaagtcagttaagtcaataccgtgatcttcaagccaagaaatagcaacagctgagtgatcaacaaagtatcttaacatgtcacggtcgtttaacaaaccgccaccttttaaagtttctttgtaaaagtcttctttattatcaataataccttgggcaaattgaacatttgattcagaagcattcatacctgaagaagctttattagtgttaccacctaagccttcatttttttcaaagacggcaacctttaagcctaactcatgtgcttgcattgctgcagttaaaccagtaccaccagcaccaacaataactgcatcataactttcagcaatttcagaactatcttttggtgtgaaaacaaatttcgccatcaagaattctcctttaattagtcttctggcttactacggtcgatgttagtcatcttgagtaagtccatccattcatcgtattgttcttcggtaactttaccagacttaagtgctgcttcacgtaaggttgtaccttccttgtcagcagtttgagcaatagttgctgcttcgtggtaaccaatgtgtggtgacaaagcagtaacagtcataagtgagttttcaagtaagtcatccatccggtcagcattaacagttaagccatgaatcattctatcagcaaaaccagtaattgtaccagttaaaatgtcacaagaatcaaggaaggctgcaatcatcacagtcttgtatacgttcatttcgaagttaccttgtgatgcagtaaaggtaatagtagtgtcgttaccaaatacctttgcggctgccatagttactgcttctgcttgagttgggttaaccttacctggcataattgatgaacctggttcgtttgcaggaatgtttaattcgttgtaaccagctcttggacctgaagctaagaaacgaatatcttgagcaatcttaaacatatcagctgctaaagtcttaagtgcgccgtgcattacgtcaatacctgagtggtgagctaagccccagaatttgttagtatcaactttgaattcatgaccgtaaacctttgaaagcttaccggcaatcttctcagtcatacctggtgcagcattcaaaccagtaccaacagcagtaccaccaatagctaattcgtataaagttggctttaattgacgaatgtatgctaagtcatgctttaatgctgaaatgtagccggaaacttcttgaccaaaagtaagtggagttgcgtcttgaaggtgggtacgaccaaccttaacagtcttccagtacttgttttgcttttcttttaattcgttaattagatgttcaattgcaagttcaagcttatcaattgcttcaacagcaacaatgttcattgcagttgggtaagtatcgtttgatgattgaccacggttaacatcatcgttaggtaaaatgttaagacctgggtgaagcttgttagctaagttggcaacaacttcgttaacgttcatattactttgagtacctgaaccagtttgtaaaacgtgaagtgggaagtccttacgtaattctccatcacttaatgaaagcaagtggtcaattgcatcttcaattgccttacccttttcttcaggttcatccccaacttcaacgttagattgtgcagcagccttctttaagtgaaggaaggcacggataatttgaagtggcattaattcaccacttgggaagttattgcgacttctttcagtttgtggaccccataatgcttccttaggaatcttaacaggaccaatagtatcgctttcaattctgtattcttgttcagccattttaaataatctccttactgaaatttagctttttgatagcgctaacagctttattatacacctatcttgtttaaatattcaaaaaaactagagatattttgaaatatttgaacaaagctatacctctattaaaaaagtccttgtacaaaaacacaagaactttgagaaaaaattaacgaacttgatggttaaatttatttgctagcaagtcaccaacaacttgagtaataaaaattaaaataataactaaaatagttgctactaaagtaacatcattattaaagcgattataaccgtaagaaattgcagtattacctagaccaccggctccgacagccccagccattgcagttaatccaataagtgaaataaccgtcacagtagatacacgaatcaattcgcttcttgcttcttttaaataaatttcaaaaataatatctttagtagtcgcaccaagagataaagctgcttcaattttacctggatcaattcctttaagggcaacttgaacttgccgagcataaaatggaaaaactcctagagttaatggaacaagagctgcttttataccaatttgtgtaccaacaattttttgagttacaggtgcaataaaggcaagaagaattacaaagggaattgctctaaaaattgaaacgattttatcagctaagttataccaaaacttgtttgctaagattccgccttcttcagttaagactaaaattacaccaaaaattagtcctaaaaatccaccaaaaatagctgaccaaaatgtcataaacaaagtttgaaagattgcagttccccaacctgcatccccactccaaccaagagaaaagacattaggcaaatattgttgtaataaattaatcatttacttgtcccctttcatcaagtttagttaccaatacattttcttgagctaaaaattctcgagctgctttttgtttttcaagatcaccttttaacaagacaaccaaggtcccaattggttcttcattcaaaagttcaacatttccatacagcatacttacttcaacaccaagttttgaatacaattcgataataatcgacttagttacgttacttaaagaataagtaagttgataaatagcttcattttcagataatttatccaagttaagtttattaagagttgaaattgcagcggaagagcccccaacaaagtttcttgttaattccttttttggttctaagaaaatttgctttaagcttccttcttcaattaagtgaccatgttccatgactgccacgcgattggcaatcttcttcacagcttccatttggtgagtaattaaaacaattgttaaacccaattctttgtttaatttctttaacaagtcaagaatttggttagtattttgaggatcaagagcacttgtagcttcatctgataataaaatttctggatcgttagctaaagcacgagcaatagccacacgttgtttttgcccaccagataattgacttggataaaagtcagccttttcttttaaatcaactaattcaagtagacgcaaacttttttcttcaatttcttcatcagataagttactatgacgcaaagcaaatgccacattttctaagacacttgtttcatttaaaagattaaagctttgaaaaatcattccgattttacggcggcgtttttgcaattctttccctgaaatagcgacttggccatttttgacaaatgatgtaccttgaacaattacatcacctgcacttggtttttgcagcaagttaattgttctaactaaagttgactttccagctccagagaaacctagaattccaaaaatatcacctttttgaatttttaaagttacaccatctacagctttaatagtttctttcttttgtttaaaggtaacagagatattatttaattcgataatgctcatatttgcctcctatttaatcttgatatcccaaccagttaattcagtatttccataatactttttaactaattctttagtcttctttgtttggtaagccttaactacatcaagataaatttgcttatttttatcgctatttcttgctgcaatcaagttaatccattgctcactatctttgttaacaggttcaacatagattgtttgcttatcacctagccctgctggggcagcataagagttgtttactacaacagcatcgacagatttgataattctaccagcttgatcagctgcaacttccttaatttgtaattttttcggattagaagtaatatctgcaacactaacaatttttttcccactcttaagtttaatcaacccagcatttttgagaacgtataacgcacgtgattcattagatgcatcatttggtactgctatagttgctccttctggcaaggatttaattgatttatatttcaatgagtaaaggcgaattggagcaataatagttttacctattgaaacaacatttgccttattagccttgttccatgcatctaagaatgcaaaatgttgaaaggcattcaaatcaatatcaccatttagcaaggccttattaggctgattgtaatcagtaaaattcttaatcttaatggtaataccatattttgcttttgcagcttttgctacactatcccagattttagcgtcttctttagtttggccaacaacaccaatagtgacagtcttagtattttcttttggtgcttgataaacaaaactaaaatatcctgcaactagcaaaaagatagcaaatatactagcaataattcgattctttctccgcttttttttcattttataaaacctctttcttcaaacaaaaaagcactcatcccaaaaggacgagtgctcgcgttaccacctttaattcgtctactacttacatagtaaacctcaataagtatctctagaaataccttgctttgttaacgagagcaaccccgctaatgactaaatatcgccattagtgatcattcctagcccatattcatcaaagactcaagtctccctttcacctaacggagctctctaaatcatgaaattacttcaactactctgctattcaagatcaagattaattaattaaatttgttgatactagattataatgtttctctaatcatgtcaagaaaaatttgtttgaaatattaatttattttgattaatataatttttaataggaggtaaatatgattaaagaatttaaggattttatttcaagaggtaacgttttagatttggcagttggtgtaattattggatctgcgtttacttcaattgtcaactcattagtaactaacttattgaatccatttttaggattatttttaggtaagattgatttatctaaccttattcttaaagttggcggagctagttttaaatttggtagctttatcaattctataattaatttcttaattattgcatttgtagtattcttaattgtaaagagtgttaacaagttaatgccaaaacctgaaaaaaagccagctggtcctactccagagcaagaatacttacgagaaattcgtgatttattaaaaaataaataatcatatatttaaaggcccttgagacctttttattttaccaaaaaatattgcaataatttctaaaattcgggaaaattatttttgtgcttaatttagaaaaagggagtttaattatgggaaattttttcttatggatatttttatccattattggctatttcatagccaaaaagtggttatttaaagctcaaccacattctattagaatttatgcggtagtttttagcatttcagcattagggttggctgttactactcaccctaccactaaaccgacaacacattatcttgtgaaaaaagttaaggctgataatttttccagcaataaggtcgctaatgaaagtttaagtgctgaaaagtctagcttacaagaacaagcaaatcaactaaaagaacaagtttctagcgctgaagaagaatctgacgcaatcgccagttcaaaagaagctcaatctagtaaagctgcagctaaggctcaagctgaagcagaaagtagctcaattgctcaggctaaggctcaagagccaaaacaaaacactagcaaaactaatcaaggcgacttgaatactgcaactactggaagaatagttggaaatgcacattcaaaaatttatcatgttccaggtcaagctggttacagaatgaatagcgcaaatgcagtgtattttaattctgagcaagaggctattgcagctggatatagaagggctaaaagataatgaaaaataaaaagttattaatttctatcttactcaccattttattttttggagctggaattaatggcaaccttaattctacacaagaaagtcaaaagccaaaagttattactaaagtcaaatatgataaaagtgaagttaaaaaatcagatcaactggatgatgaaaattctgaactatctgatgatattcaagagttaaaaactcaaatcagggattataaaaaggcccttaaaaagttaggaaaaactgctcaaactgattcagcaaaaacagaaactgctagtgctaatttagccagcttaaattatagtggcaaagacataatcactgtcaataataataacccatcatttaccaagtcagatttatcaacagctaatggcgcatggcaaagttatggtgacttagataacttaaatcgtgcatcagcggcaaatgctctacttaatgtaagcttaatgccaacagctaagcgtgagccattacatgttaatccaactggctggcataacaaaaaaatcagtggtggctggctctataaccgttgtcacctaattggctatcagcttactggacaaaacaataattggaagaacttaattaccggtacccgccaattaaatgatccagatatgctcaaatatgaaaatgaagttgcaaattatgtaaagcagtccaagcatcattttgtacggtatcgtgtgactccaatctttagaggaactgaattacttgcacgcggagttcaaatggaggctcagtcgactggcgaaaatacggttcatttcaatgtatatatttttaatgtgcaacctggctataatttaaattatagtgatggtacaagccaagttgcataaaacataaaaaggtatttagctcgagttgttgtgatactcaggctaaatacctttttgattattttttctctttaacaatataaattggacgatgttttacttgtaaataaattctgccaatatacttaccgacaattccaatacatagcaattgaattccacctaagaaaagaataattgaaaccattgatgcccaaccaaaaatactactcataggtgacataatctttctaataataataaagattatactaatcacagaaattgctgaagttactgaacctgtccaaacagccaaacttaaaggtgcttgtgaaaagtcactaattccatccatagcatatttaaacaattgccaagttgaccaatcactttctccagcaactctttctacattgtggtaatcaagatacttggtcttaaatcctacccaagaaaaaattcctttagaaaatctgctatattctctcattgaaagaattgcatcgaccatttgacgtgtcatcattctaaaatcacgtgcacctggaacaatttctgtgttagaaattttattgatacacttgtagaacatatcacttaaaaatgacttaatcttcgcttcgccagttcggtccactctgcgtgttccgatacagtcatactctccactttgtaattccttatacatttctggtagaaattctggtgggtcttgcaaatcaacatccatcacaactacataatcacctgttgcagcatcaagcccagctaacaatccagcttctttaccgaagtttcttgaaaaagaaatatagtgaacatgcttttcgtctttttcatgtaaggctctcatctctgaaagtgaattatcatgtgaaccatcatttacaaaccaatattcaggttcaatatccattttagttactactttttggactgcatcataaaataaagggattgattcttcctcattataacaaggaacgataattgaaagtttatccatttttttccttctttaaacaaaattcactattcattataccaataaaacacttacaatatccatcatttaatcaaaaaagaagcctattacagcttcttacaattcttcttttttgaaagtaaatactttattaacaacaaactgaagcatagttgctaaaaatgttgaaattactttgacaaccatttcattttgatgcattaaagttacaaaaataaataaacaagttgtggtaattaaagttgtaatttggccgataatataatatttaataaatcgacttaacaagtgatcacgaacatgaaaattcaaataagtattcatatagaagttattgactaaagcacaacttgaactaataaagttagctacttcaactggcaaagcggtaaacttggttaacagccaaaataaaccaaaatcaataaacagaccaaatacgccaataaagccataaatcacaaattcacgaaaatcgtctgacttaatcagactaataatcttttctatcataactacttcctactttctaagataggttaaaaagctgtaatcatatggattattttcatcagctgtaaacgtttctctttttattaatttaaatgctgaatagtcaattgctggcattgtagtatcggccttaaaaattccatcaatctcggttttttcaaggcaatctacaatatctttcaatccttcaaacacactcacaccaccaataacagctatctgttcttctttatgagcggacaagtactctcttaattgcttcatagaagtgacaaaatctacttgactgttattttgaaatttctcaattagtgcttcatcgtgtgttaataccaagtgctttcgcttcggtaaaacaaatggcaaactgagaaaagtgttcttccccatcaccatcgtcttgcccattgttttttctttaaaatgtgctaaatcagctggtaaatgccaaggaagatgtccctgatagccaatttgatgctgattatcttcagcccagacaaaactgatcatatttttctcctatacagctactggtgctttaataacaccatgatgtttataatccagcaccttgatatcttccatttcaaagtcagaaatatttttcttagctgaattaagccaaagttttggactatcaaaaggatcgcgtgctaattgtttttcaacttgatcaaagtggtttttgtaaatatgagcatcgcctagtgtgtggacaaattcacccacttcaaaaccagtttgtcttgcaactaaacttaaaagtagtgaatatgatgcaatgttaaatggtacacccaagaacatatcaccactgcgttgataaagctgcaagcttagcttattatctgcaacataaaattggaacaaggtatgacaaggaggcagtgcacttgttggaacatcctctggattccaagcagaaacaatcattcttcttgaatctgggtgagtttgtaattgatttaaaacatcttgaatttggtcaatgctgccgccagagcgttttttccagtggcgccactgcgcaccataaacatcacctaaattaccgtacttttcagcaaaagcttcgtctgacaatatgcgttcagtaaatagcttcatttgttcatcatatagcttcttaaagtccgcatctttttgacttctaagaccaaaatcattcatatcaggtccttggtattcaggtgaattaacccaattcttaaaggcccattcatcccaaatatgatttttatgttctaacaagaacttgatattggtatcacctcttaaaaaccaaagaagttcacttttaattaaaccaaaaggaactttcttagtagtaactaaaggaaagccttgagataagtcaaatctcatctgagctccaaattttgatcgagtgcctgttcctgttcgatcagttttatcatgacctgtttccatgatattttttaataaatccagatatggttgttctaagaccgccataaaatcgctccttatatttacaatgtttctagcttatcatatttcagactaattgatgtccaaattaaaataaatataataaaatactcataaggaggaataaaaaaatgatattttctatctcaaccctattaattgcaattatagttgtcgtattaattatcttttcttgttcaattgtgccacaaaattatgaaggtttagtggagactttgggaaaatattctaaaactgaaaaggcgggactaatttttatcattccattaattcagcgagttcgtaaagtatcactcgcacttcaaccccttgaaattagtaaatattcaattatcaccaaagataatgctgaagtttcaactagtttgacattgaattaccaagtaactgattcattcaagtacttctacaacaacacagactcagttgagtcaatggttcaattagttcggggacatttgcgtgacattatcggtcgaatggacttaaatgatgccttaggttcaactagtcagattaacgctcaacctgctgatgcaattggcgacttaaccaatgtttatggtattcgagtaatccgggtaaacgttgatgaattacttccaagtaaagaaatccaacgtgcaatggataagcaattaactgcagatcgtgaaaaaactgctacaattgctaaggctgaaggtgaagctcgtaatatcgaattaactactaaggccaaaaatgacgccttagttgccactgcaaaggctaaagcagaagcaattaaaacccaagcagatgcggaaaaataccgaatagaacaattaaaagctgcattagctgatgctccagatgattactttaagaatcaaagtattgctgcatttaaggatttagccaagggtgaaaacaatctaattgtgatggataaggacaacttaacgcaattaggtaacatccctgctgttagagaaatttggaaaaagcaagatcaagattagttagctacaattaaattgcataaaaaagccatctcaagttgagatggctttttatttacttattctttttatgcattcttctgaaatagtattctgttgcacttgctaataataccaaggcaccaactgtcactgaaactcttgtttcatcatttaagaacataaagaatacaattaaaactaaaatagcaaaagcaaagaaatttgaatatggatatagtggcaacttaaatgggtgttttttcataatttctggattatgttttctaaacttatattcagcaagcaaaataacaaaccaggctaccatccctggcaaaacagatgaactgtaaacaataacaaagatttcatccatagtcttgttaatggttgaaagaataaagttcaatacaaatccaatcaaaatcccagaggtaatccccacaattgccttacttgggacaatcttcttagaaatctttccaaatatttttggtgcatcaccctcattcgccaacttaaaaagcattctacttgaagagtaaatcccactgttagcacctgacaaagcagctgttaaaacaacaaagttgattattgaagctgccccagtaatcccaactttagtaaaggtttctacgaatggtgaaccaatagctgaaagttggttccatggatagatagaaacaattacaaaaattgctccaacatagaaaattaaaattcgccataaaactgactttacacttttaactactgcttccttaggatttgctacttcaccagcactaatcccaattaattcaatcccttggtaagaaccaacaataattgacattgaaaaaatgaatccctttaggcccccagtgaagaacccaccatgactccataaattactaaagccaacaggtttccaattgttacctagtccaagtaaaattactaaaagtccaacaataatcattaagacaattgtaactactttaatcattgagaaccaaaattcaaggctagcataagccttggcactagccaagtttgctaaaagtaagaagccaataataatgattccaacgagtaaagccggggtctttggccaccaaaacttcaaatactcagttgccgcaacaacttcactaattccaacaacaatatattgaaaaacagcagcccattcagccatattacctgctaaaggatgcacatattcagttgcatagtcggcaaaagaacctgtccctgggttaacataaagcatttcacctaatgctcgcataacaatataaagaataagcccaacaaaaatatatgctaaaagtacagaaggacctgtccatttaatagttgaagttgaccccataaaaagtccgactccaattgctccaccaagagaaatcatttccatttggccggcagtcatcgagcgttttaactttggtgcattattttctgccatgaatatctcctcctactttcaaaccatgtcttgaaatatacacaattgcagctactatcatgactaataagcctgcaataacagaaactctcgtttcattgttaataaacatgaagccgacaatgactaataacattacaaatgcaaaataatttgaaaatggatatagtggcaacttaaatggatgattctttaacaattctggattatgttttctaaaacgtaattctgcaagtaaaattacaaaccaaggaatcattccaggtaaaacagatgaactgaagacgataacaaataaatcttcagttgatttgctaaattgagatgcaaatacattcaatacaaaaccaaggaaaattcctgatgaaatccccataattgctttacttggaacaatatgcttagacaaatggccaaacatcttaggtgcatcaccttcatgggctaatttgaaaagcattctacttgatgaatagattccactatttgcacctgacaaggcagcggttaaaaccacaaagttaataattgaagcagccgcagtaattcccaccttagcaaaagtcgttacaaatggtgaacctaagcttgataactgattccaaggatagattgttacaattacaaaaattgcgccaacgtagaaaattaaaattctaaataaaacagattttacacttttaacaactgcttcttttggattttctacttcaccagcactaatcccaagtaactcaattccttcataagaaccaacaattattgacattgagaaaaagaaccctttaattccaccagtaaagaagccaccatgactccacaagttactaaaaccagttggatgaccaccattaccaaaaccaaagaaaattactaaaaatcccaaaataatcattaaaacaattgtaatgaccttaatcatcgcaaaccaaaattccaagtttgcatatgctttagcacttgccaaatttgccagtaataaaaaggcgataataattacaccggaccaaaaaacatttacttgtggccaccaaaacttcaaatattctgttgctgcaactacttcactcattccaacaactatatattcaaaaacattggcccactcagccatataaccagccattggatgaacatattcagttgcataatctgcaaaagatcctgtaccaggatttacataaagcatctcacctaaagcccgcattacgatgtaaagaatgaggccaacaaacatataagctaacaaaacagacggccctgtccatttgatagttgaagttgatcccataaagagcccaactccaatcgctcctccaagagatatcatttccatatgccctgcagacattgacctttttaactgcggagcagaactattttttttattcataaaattcctctcatcctgaataaactaagcgcagtagtttattcagcaaattccttttaatattgtaagttatctatttgtccatagcaaattcaagcttgtcaataatgaaaaatcatcttacctaagaaatataaaacgggaataagcaaacttggtaataagtctaagcttttaatttcacgaatttttagcaaactaatcccacttgcagtaattaagaagccacctacaaggcaaagctcattaactaactccatactaaaaaagcttgcaaagcctaccttaacaaggccaaagattaagaaaaaccatcccaatagaattggtgtttctaaaagcatcccccaaccaaagctagctccaaaaataattgcacaaacaaaagttagagaagcattagttaataaaaaagttaaatctccagtttttgcagcattaattggtcctagtaagctaagtgcgcctatacaatctaaaaaggtcgcagttgcaacacctttagctagctcacttgtaaatttagtttcaagcaaattttctacatgttgatcaacttcaaacaatttacctattaaggtacccaaagttaaactcacaacaaataagagcgggaaattcgacttattcatgtaattaaccaccgtattaattcccactcctaaagcagctaaacctaatgctaaccaaagggcttcaatatatttttcttttaaatgtcgtttaaataaacagccaattgctgtaccaaatattacagcaagaccattaattaaaatgccaatcaaaattccacatcctaaaaactaatttagcttattttttctttatcattttatataaaatggttcaaattttccaatcaaagcctttatttttttctaaaagtaataacaaaaaattgcttttttcatcaaaaattattcatatttaccagttaaattatagtcaatgtttgaaaggagactcactttatgaaaagaaagaaattaaaatttgtcagtattcctttaatcgccctcgcaatcgctggggaaacagtaactatttctagtcaggttgtaaatgctgccaattcaactccccctgcaatgccttctggttcaaagaaaggtggagcgaatacacaaagctatgattatactggaagcttatcagcttctgttcttgtaaattcaacaagtcgcaaattgcttaacaaaacttacacaagttctagcaaagataaaaatgtcgctttagtaaaaaatgccggttccttaaccttaaatcatgttacattgtctaaaactggttcttcttctaatgatgacaataacaacttctatgggactaattcagttttattagctactggaaagaaatcaactgcatatattaaaaactctaaaattaaaagtaatgccaaaggggcaaacggaatttttgcttcaaataaggcaactgtctatgctaataacaccagtatcacaacaactggctcagctaattcacgtggattagatgctacctacggcggaactattatcgcaaataaaactaatatttctactaaaggtgaccactcagcagcattagctactgaccgtggcggtggtaatgttagcgtaactaactcgaagcttaagactgcaggtagtggttctccattaatttattcaacaggaaatatcgaagttaataatgtgactggttctgcctctggttctcaaattgccggtatggaaggctataacaacatttatatttcaaattcaaaattagtttctacaaataacaataagactggttctgatccaattaaaaatggtgtaattctctaccagtcaatgtctggagatgccgatacttcaactagcaaagctgcaaaattccaagcagtaaattctagcttgtcaacttcaattgattctggtgcaatgttttatgttactaacactagagccaacgttgtactcaaaaataccaagttaaacttcaattcaaagaaagttaacttactaacgattgccggtaacaactctaattcttggggcagtgctggttcaaatggtgctaaagtaattttcactggtatcaaacaaaaattagacggcaatatctccgttgataatatttctagtcttaagctttatttgttaaagaattcaacttatactggtaaaacaactattactacaaattcaaaagctactagttcaagtaaaacttcagctccaattaccattaatatcgctaaagattcgaagtggatagtaactggcaattccactgtaagcaacttaaacattgaatcaggcgcaaaaatcgttgataaatcaggtaaaactgtaactattgtcaactcatctggtaaaacgctcgttaaaggaagcagtaaatacaaaattactgtaaaagggacttatagtaataaagtaacaacaagttctgcaaatagcttaagtaaaagtagtgtttcaagaacttcttttgacaaatatttcaatactaatactaaaattacatattaaataaaatctgcgcaaaaaatgacaaccgtcttagttctgcccagctgatagttatcattataaaaatcaaaataaaataatataaccggaagcggacgcttaagctcctagagttgccagtatcgatgacgtattttttactcctctaagtatctttcatgatgaaaatttaggtgagtcaattcttgaattatctacaatatttctattaaaaaagtagcctttcggctactttttctgctaatatttctcgtgattaatctgcaagagtaaagcatacaaagcaccataaatattagcatcattcataaatcttgcccgtacgatttcaggtttggtcaacatcttcttgacaaattcaacctcatcaaccagctgatcatattgacggtttatctcttcaactacgattggttgagcactgataccaccgccaataacgattttatcaagatcggctacagcttggatattagtaatcaagactgcaatctcgcggcacatccgcttaaagattttgacagctgctggattttgctcttttatcgcgtcaaatgcgactaatccatctttaacatcttgattcccaacagcctgattgacttttttaaccattgaaacagctgaacctttgtcgcaaacaaaactttcaaaaccatacttagaagaatcggtatgcatgaagcttaattcgccagcttgaaagtggctgccgcgcacaagttttccatttaaaattaatccgccaccaatcccagttcctaatacaactgccattccgttatcgatgccctttaattcgcctagccaaagttcagccaaaccagctgcttttccatcattttcaactccgactgggatatgataacgattttctagtaattctttaaaattagtttgatcaagaaatggcaaggccccgccgaaataaacaattcctttttgcacatcaacttttcccggtgcacaaattgcaattccttcgaacttaccaacatatttatcggcaatttcataaatctttgccataaaattattaatattatcagttggagtcgaggttttatctttttcgataatttcaccagagttatttaataaggcgtattttaagttcgttccgccgacatcaaaagctaaatactgtgtcataattattcctctttttaacaaaaaggaagtagcaacagctactcccctcttatctaatctaaatcttctccattggaagcgataatcttcttataccaatcaaatgaatctttcttataacgcttcaagctgccatttccctgatcgtcgcggtcaacataaatgaagccgtaacgcttagacatttgaccagttccggcactgactaagtcaatgcaaccccaagtagtgtagccgattaagttaacgccatctttgatagcgtctttcatggcactgatatgttgtctcaagtagtcaattcgatagtcgtcgtgaaccttatgatcagcagtcattttatcaactgcaccaagtccattttcaaccaccatcaaaggcaagtggtaacgatcattcatcaattcaaggtagtattgtaagccttctggatcagttgaccagccccattctgaatatttcaaatatgagttcttggcaccagctgaaaagtttccgccgacagtgtctttaacttcgtgcgtagttactaccgtagacatgtaatacgagaaggtgtacatgtcgactttgcccgcctttaaatcggctaagtcttggtcagtgatatctaagtgaacattatgttcattccataagcgcttagcaaaacttggatattcacctaaagcttgcacatcgccgcaatagtaaatattttgttcccatgaatgacggcaagccaagatatccttggggtctggagttaatgggtatgaaacaataccgcaaatcatatttcctaccatatagttaggataaatttcatgagcagctttgactgcacgagcactagccacaaattggtagtgcaatttttgataagcatgttgaaatgcgctgtcgtctccggcatgttgactaaacatgttaagcatcaagactgcagaattaatttcattgaaggtcagccaatattttactaagcctttgtattctttgaataagaccgttgcgtatttaacatattcgtcaatcatcttgcggtcttgccagtcatggtatttttcacttaggtaaaggggatcttcatagtgagaaattgtgacaagcggttcaatgttatatttctttaattcttcaaagactctacgataaaaatcaagtccagcttggtttggttctttttcgtcaccttttggaaaaattctggtccaggcaattgataatctaaaagtcttaaagcccatttcagcaaataatttaatgtcttctttgtagtggtggtaaaagtcaattgctacatgatttggataatattcatttggatcaattgcaccaactgcaccttctggtaaacccgcaccaggtaatgcaggagttttgccaggcttaccattaagagtataagttaacattctaggatgttttaaactaccagcagtggtgatgtcagtgactgataaacctttaccatcttcgttatagccaccttcaatttggttagcaccagtggctccgccccataagaaatcttttggaaatactgattcgttcatttattttttacctcctagttgagctgtcagatttatttttattttattataagtacacagttttttgaaagcgctttttactaaaataacaataaactaacttttttatttagcttagtttagatagctaagggatctttttatttaactaatttctgatgtacatgatggcggcgttctttagtggcaataataactattaacgtaactacaccagtaacaatattgattaagcctgcattaaaaataacggttgaagattgggtgcctaaataatttgcaataattggcgaaagaaatgaacccaaatttgaaccaactaatgctattgaagtaaaaaatggggcttttttagcacttgaaacttcacttattctattaaaaatataaggaatagataatgagcaaacaataccatataagattgaaatgattgtaataacccacatatttctagaaatcgaaattaaacacgtagctattccacctattcctaatgcaaaaggtaaaataaatttcttcaattttttataacaaataccaaagatgaaccctccaattacattggaaatattaattaaagataaaacatttgatgcttgagttggggaaccaatattattttcaacaaaaaatgttggcaacttaacaaagaaaatcatagctgaaactaaacccaagaaaattaataaggttaattcagcaatcaaagctattgaatcttgctgtacctcgtttccctcattagcagccttctgtaattcttttttctgttcttgctcttgtcttttaattgcaccagattttacaggatcaggaacaaagaaaataaataataatagagttggaataaataataagtaaaccaaataggatgcatgccaactaaaaactaataattggccggcaataaaagtcattaaagctgtccctaatcctgcaatagcagatctccagcccattaatttagctctttgatcaccataaaagaaaactcctattagactaattgctaatggattagctaaacctattcctgcacctaaaattgctctagaaataataatgatattaaaatcgtttaaaaatgctggaataatagaactaatagacgcaattgctaggcctaaaattgcggtatttttttgtccgatctgttttacaacaaagccacttatcaaaacaaatatagtcacaaacattgaaacaatggttgtaataagttcaatgttaactaaagattgatttgaaaaagttcctttcatgccaggaatagtagcattaataacgcttgccgcctgttccacaatattcaatgaaagtaatgctaaaacaattaatgcataatgaaacttacttatattttttgacataataagcctctttctactaaaaattaatttagatacttattaagtaaccaaacaggtgtacaactccatgcgtgacaaaaactattaaccatagcatttccataaggagaaaagttggggtgttctggttcaaaagcttcccaataagtatcggcaccaagagaaatcatcttcccccagtactctttcatcaatttaattccagcttccctaaatcctgcttcgaacaaagcttgtgttacatgatgatacatatacggggttgctatgcctttaattggaaataattcggtttgagtctttttcatgagagcatgattttgttcgttatctaatacatgtgccaaaaccatccaaacttgactagccacatttatttctttattaggtccagaaatgaatagtccttttttgtgatcaaacaacttattttcagcataatttaccagtttgtttagttgattttcatatttaagtttctctgagtcttcagccattcctgctaagtcaattaattgtttaagtacaaaaatagtgatagcctgtgctgaagtatttttatcaaaatcctgagaccaatcaacaaatgttatgtaatctttatctgtaatgacctttccatcatcagaaatgaatttctgatcatagtcccactgtttcttggcgattggatacagatcatccaatatctcctgattaaattcatgtttcagcaaatcatctaaggttgaaataaaaaatagtccgtaatcatacataaatgtatcatctggaatatatttattattggtaaagacattagcagagattctaccatcctcagcggtcatccctgcaaacaaatacagacatctcttaactaaattggtattgttaaaggaagcgtagttggctaatgcttgtaatcttaaatctcctaaccacaatctcctatctctttttgggccatcttcaaaaacgtcttgcatacaatcgtgcaaggtattcacaccagtttcatagattttatcaagttcattatcatcaaacttagactttggaatttgaaccttatttaccgcactttgactgattactcgaggatcagagaacttaactgaccattttggagacgtatctactacgcggatttcaacatatctaaagctataccttcttggtaactttaaatcaactggcaaattatctacatgaattaactcttcctgcatccatgatttacttaaccaaccgttataatcttttgaattatatttgaattcattaggcatttcagcgaaccgaatttttaaggttaaaggtgcatccattggtgatcccacatgatcaatatgaatctgaaattttcccacacaatgttgacctatgtcgataagaaagttgtcatcttttccaaattttttactttttaattcattgacagatccggcgttagaaacaccaacaccatctaattttgtttcatccttggttaatttgattagttgtttagctgacagttggtgataaataatctttggtttatatttatcagcttttttcaaaaaaaccgcattatgattgaactttacatctaaatttacttgaaacttaaaagccattattatttcctcttattttcactttgaattccatatttcttttctaatcgaaccatatttaatccgaacaaaaatgcaataacgaccattcctgaaaatccaaacatggtagttttaataacgctttgtacaacaagcgcgggtgtgataaatgcaaatagcccacacaaaaatcttgaaaatccaccaatgaatccttgaatcgatgatctaacagacataggaaatgcttcttgtgtccagactttatagattgcttcacctgcgatgttacttccgatactcatgaaaccaatagcaaagataattggccataattcgtgacttaatgctgccaaactgaacatacctaagaattgaatagtcataccaataatgaaaaaccaatttctatatttactacctgcacattttgcaaaggccatagtggcaaacagacttacaaaatttaaaactaacccagcaccagtagccaagctttgggaagcatgagcattaacaagcataaatgtttcaaattgtcgaaaagtatttgccaataagttccagcaaatatagaaaatcataatactaataaacatagataaatatttctttttattcttaccaaaaagaacgtttaaagttgattgctttccggtagttttattattacttaaagaaacttgatgcttattaccctcctgatgaagtgtcttaaattttctagaaaaagttctccaaacgccaatcagcaaagccaaaattcctaaacaagcaaaaactactcttgctccagtggcgcctgccatcttagaaactaaaaaagcagcaccataagaacctaacacgcctatttgccagaatatttgagttgaagcaattaatttggatgaggttttctcatctggagaatcatgggaaatcattgtcaaactaattggtaaatcagcacctgatgcaaatcctgctattatagaaccaacgagtaatgcaagataatttggtgcaagtacacaaacaaatgcacctattgcaaaaagaaaattcataaaattaaaggattttacaagtcctatttttttggtaatctcaccagcaattaacgatccaattgcaattgcaaaagtcaatgcaccagaaataataccaacttggccattatttaaatttaatcctaattgccatacggtgatagtcgcagacatcccaacaattattccggatcctaacacggaacctagccccgcagcaatagctagcggcttgtatttatcgattgattctatttcattaattgtacttttcattattgaacctccgtttctttgctttaattatctatttttctggaagcgtttacactatcgtgataaaatttatttagttgcaaaactacagatagaggacaatatgctagacaaaaaaattgagaaaaaaatactgtcaataacgacagtagaacaagaacagctcaataataatggaataaatatttgtgatgtaaagctagataataatgaagaattcaaaaaacatccgattttacgaatgccattttggaatttctttgactttgggcgaatttcaattactaaatcaaatagattttcatatataccagcccataagcataaatttattgaaataaattattgcttttctggaagaagtatccagtatatcgatgatcatataattgaattacatcctggtgaacttataattatggatagagaaatacagcaaaggataaactatgccaggaaacaggatatcttgataaacatattaattagagatgattacgaaatttctaatttgctgaatggaataaataaaaattctatcctaataaaatttctaaaaaatgccacgcaaaattattttaatcaccataacttcataattttcgacaccaatcaagacatagtttgcaaacaaatcatagagaatatcatatcgattggttttaataaccacggaaaaaatgaaactattttagaggcgctattaaaaagttttattttatgctgtaatgaccaattaattattaaaaagcaaattaattttacagagcaaaaaaataatacttttgaaatcattcaatatattaacgagaattaccaaaatatttctctgaggaaaacagctgaaacatttggttattcaacaaactatttaggaaacttattaaccaaagaaactggtcatagttttaaagagattcttttaatgagacgtttaaacattgcatgtaatctattgcaaacaactgattatagtattgaagagataagttccttggttggatatgagaatcattcgtctttatttagattatttaaacagcaactaggtattaaacctcaagaatatagagacagaattcgttatcctgtacatttaagtgataaaaaagaatttttaccaaatccatatttcaaataaaaagggacagtttttcaaaaataactgtccctttcttatatttccatttcaataaaacattaatctttcccagttaaaagcatcgcttggtattcttttcttggtaaatgaaacttttcatcattagtgatttcaccatcaaaatcttgaatagtttcatcccaggcgttgatcaactttgcattatatttctttcctttaggcaaaaagctaaataactcaaattctggctgattttctccaaagtagactaaccatttcttttcatcaggagttgagccaacagctaattcccaagtaggaccgctggtggcctgaggtctaacccaatcaaatccattgtcttttaatagcttagacaagaaattaattttcttatgactttctccgtatagttttccaccatgagcccaccagattggacgattagtattcggcttatcaatatatgtttctccatgagtacaacctccaccacgtaaaactacgcgccagaaattatccatcataccttgagcagtattatcgccccagccaaattcaatattaccttcataacgacattcatcatctactactggcttttgatattcttcaatccatttaggaataagaaatacgttatcactctggacacttacatgtgtaatccaaggcttagtttgatcataccaatttttaatagtatctttatgttgtggtggatcataaaagttatgaattgattctaagtgatcagaaggatctttttcatgaacaaattgtccaattttatcccagtcgcctaatggaatctgccctactaaatccattaaatcaaattcatttgctaaagcccaccaaacattcttatatgatgctaatctagcaattacgtatttgagatagtgcaagttgttttcaagtcccattcttgcaaatccccaacggtcatatgggcagaacaaaatcaagtcagcttcaacacctaatttatcaagtttttcaatattattttctagattttggaaatactttggcacaggtcttgtaaaatcaaatcctgtatctttagcatcaaatatccagtcaactccgcccctcaaaacttttggagctccttcaaatggataaatttctggttcaatagtgttataatcataactctttggaaataccagcattcttatcttattgaaagaattatccttcaaagtttctaatgtttgctcctgaatcttttcaggctgagtagtccatgcatatgcagttgtaccaaaaggaatatatctagtaccatccgcatatgaaaagtgtgttttccctgccaccctaacaggaccatgattatccttttccgcaggagttaccaaaaattcatctgttactttatctaaacctttgacgttagaatgagtaattacttgaaattgcccttcaacttctggcatatatctaactttatatacaccatttccatcataaaacccgtcaacttttactgaatggttattatgttcaaatgtagccgttaactctacatctctaaatggatttccatcttcaggtccatttaaagttaactcatagcgtttccatttttctacttgcttcatttcattttctccttagattgatacatgttttttaacatgttgacttgtcaatgcgatacccaagaatactattgtgataattgttaaaattcctgcactaattttcatttgatcaactggagtagttgcattcatcattttagctaagaatgaaattatgaaaggtgaagcaaaagcccccaaattgttacatacttgtgcaatagaaataatcaaattactaatagaactgtccacgtcactcaagatagtgtcgtatacataaggaataatcagagatgaaatcatcatgaagattaatccaataaagaaaatgatcatattacttgctgaagaacaaataatgaatccaatgattccgccaatagttgatacaactggagtaaaactatgtaatagcttataaatcttactgtagcccattgagattacagcaccaattaagcctgcaatcgcaatttcagttgataatactccttgatttgctaattgattttcttggattaccagagctgagccagtggcttcaaccataaaggctgcgaagaataagaacaacatcaaaaatgcaacataaattcttacagggatttttacctttgacttgcctttttcattattcttatgaactgcttcaacagtagtagcagcttccatttttctggtatatcccatcataaataaaattaagaatggaattataattaacatgtaaaggaaagtactttgccaattaattcctaataataaaccggagataaaggtacacgaactgttacctaaagtccccatcgcaccttgaataccaattaaagtcttttgttcatccccgctgaagcaatcaccgattaaagaaactgcgagtgaagtgaataaaccaataccggcacctaccaataaacgactaaatacaattaatgaaaaattgttaataaagaatggaatcaggccacccactattgtggcaagcatcccgataattacagtatttcttttaccaaaccatcttataaatgcattactaaaaagaataaaaagcataattgtaaatgatggaatcgtgaataatgcttgaatagaagtaattgattgatttggaaatgattttgcaattaatgggattgcagctaaattagaaccagctacttgtaaaaatagcgatattcctagaatacctatctttaatttccaattatgtttgttgttttgttttattgactcaacatccataatttttcctcctgttttgaatcaccaattttgtttacataaacatcttacaatgtaatcggttacattaaaacactaaattgctaaactaatactaaattaatgaagcgctttcttttgtacttagcaattaaatcaataataaatttttctttgattttttatatgtaatccgttacatttgatacgaggagaaacaaaatgacaatcaaagaaattgcaaaactcgctggggtatcgacagcaactgtttccagaattattaataattctggaaaggtcaaagaagagactcgaattaaggtacagaacatcatagatcaaaataattaccgtccgaatcaagtggccagaactttatttaaaaagaaatcaaatataataggaattatcgttcctgacttatctaatatgttctattcaaaaataattgaaggtatccagaacattatagataatactaactactctttgatgatttcgtttagtgccgggtctgatgataaaaaatatatcgattttattcgaaaatttcagcaagaaaatgttgatggaatcataacttctgctttcagcggagaatatgtaacaaaaatcaaaactccgattgttatgtatgatagtgcaaatattgaagataatatcattaggattgcttctgacaacaaggctggaggtaaattaatctctaagtttcttaataaaaatatcaagaaagtactcattcaacatcttgatttatccttacctactgtggctgaacgttttaattctttgattgcagagctgaacaaaagagatatcacatataatctggtggcagttgaaggattaagtaaaaaacatgccagccaaaaagtattagaaaacataaagcatttcgatgcagttatctcagttaacgatgagtatgcagccgatattattaaagaatctagattaaatggttttaaaattcctgaagattttcaattagtaggctatgacaacacaaatctggcacagtatacagatccaacaatttctacaattgatcagcaagcttttgaaatcggaaaagccgcagcaaggcgcttaatagatagaatcgatggaaataaaaatacagaaaatacaattattccagttaaagctttaaaaaatgaatcgacaaaataaaaagacacatttcgaatcaaattcgagatgtgtcttaattttttattattaaaataaatgtatcaacttgtgctcagttaaccaagtcaaatataaatctacccattttctagcttgaatattactttgacttctatctttcttactatcagttctaagatcacccaaagcaagtccatgtttacctttttcaaatatatgaagttcaaaatctacgtcgtgctttcgtaaatttgaagccaattttaatgcattttccactggtactaatggatcttgcattgtatgccaaataaaggtaggcggacaatcactagtatcagcgtcaataacattaattaatttttggcgttcaatactttggtcatgccccaagcttgcataattgaccaacttacttatctcagattttgtatctgcaatgtaggtctgacttgcaccatatgaaattgcgattgaattaggtttataagtttcagggtctaatttaactaatttttgaagccaatcttttttccaataagtacctatttgtgctgttaaattaccaccagctgaaaagcctaagacattgatactatcaggatctagattccactcttctgcttttgatctagtataagaaattattcttgctaaatccattaatggatttggaaaactagaaaccggttcttttgaaaaatcattgtttttatcatggaagaattctaatccttcggtcgcatacttagctactacacaagagaatcctttacttaaaaattctaaggcaattggttcttcctctctccaagaagtccacatgtatgcaacaccaggaacaataatcattactggtgatttcctgttaatatcaatttctttattggcttcttgaagataaaaagtggcgcttgctccaatatcaccaaaatttttattgaaatacttcattttatacctctatgccaaagaaacacttgaaactttttctgtttttgcttgatctacagttgctaataataactgatcaccagcttgtacatgcccttgagtttgagaagcaaccttatcaaagttagcaggattcgttacaattactggacttgccaagttgaatccagcttccttaatcaagtccaaatcaacagtttctagtaaatcaccttttctgacggcatcaccatcatgtactaattgcttgaagcctttaccctttaattcaacagtatcaagtccgatatgaatcaataattcaacaccagacttagattttaaggtaatcgcatgcttagttggaaagactgaaacaaccgttccatcaaatggcgctttaacttcacctttttcaaggctgactgcaacaccttgaccaactgcaccagtagaaaatacaccgtcgtctaattctttcaaaggccataaaccaaatgaaccatagccaactcccatatcagctccagctagaactgctctccaagcggactttcttacttcaaaagctgaatatctctcaggatattgagaatgcattttttgcaagccttcgtagcagatttctgcatcaacaattggtccttcataacctgatgcccttaatttttgcggaatggtaaaagcagtattttgtccggtttgagcatgaccagattgatagctaaagaagctaattcgctttttaaattcatctggtaactcataactttcaccattaatgtggaaagtataaattccttctggatctacttccttagcactttcaagaacttcacgataatatttaatcgcagcttcgcttttttgagtttcattatctacaaaacccacatccccactaacaaaccaaatcgggttaaacttcttaaatctatttactacatatttaatataaggtctaatttgttcaaatgggatagtattattcttaacaaaatgactcatccatgtgtctggcacaaaattaccccataaaaggactaagctaggcaccatacctcgctcttgcatttgttcaagcattttttcaacattatcgaaatatgaagtatttatctttgaaaaatcatattcataactaccatcatcatgttcgataatcgcaaaaggttctcttcctttaattggacaacttgaatcatattgtctcaacagatttatttgaatagccgtgtagccttgagccttacgagtatctaaatagaatttccaatctggcaacgtgagattggtaaatgcactccaacaagtatcagctaaataaaagaatcgctgaccatctttatataagtacttaccattaacagttaacataaatttctccttaattaatcatcaatgatgctgttaatatcgccataccaataagctgctaccttatcagcaattgggtcgaagtaatctggcttaacattaatatatttaccagcttccgctaaaattggcacaatatctgcacgaacaccagccatgtggtgaatatatggaccataaacatattttgcttcgaatctatttaaatctttaaattcgaaccaagcgtaagttccttgttcatatggtccttggcaagtctcggcattgccaattagcattgagtattttccatggtcaccatcaaaacgtactaaactataatttccatcttttgcttcaaaagcagcagagccaggataatcaaaaacgaaatgtgatggtggtaaaactggtttattctttgcagtttggaaagcaaaagttcccaagtgttgtagtaattcaccattttcattttcaggatggcgacaatttacatccgcaaagattgctctttcttcgcctaaagttgcgctttcagctaatacctctgaaattgcaccattaatatcagtttcacaagtcactggcattccttcagtttgaagtaatgcttcagaggcatacggaagaattccaatttccctttgcaattcggtccagcattgaattgttccggcattacagccatattgattcatcttatcttgtaaagctaatttaagagctgcgactttattaaagtcatcatctttaatttgaatgtagcccattttcgaaagacatccttagtttcttcaattcttgaatctttttcttcaattaaattgttcatatgtgaggtcaattcacctaatggaattggagataattgaataccgaacttttcaagtagttctccttcattaacaataactgaccaaaaatcaaatggacgaggtccaacttgaagaagtcttgtatgcttaaaagttttaactacgttgcagactctaataaaatcaatcacgcctctactaaaggatgggtcatcgatatcactatttctaatgtaagtaaatggtacattgaagtgacgtaagaccttaccgattgcaaataggccacattgtgtatctcttcttcttgaaccatctggagctggagcttcatctcttggaccccaaagtagaactggcacatttaacttagcagctaaacgggctacttcatattcagtcccaaaattttcatttgcaatgaagagaccatcgatgttttcttctttaaactttttcgtaattttagctaaacctgcatcatcataaagtaagccatcatcattaacatctttaatgtcaacgtaatttacgcctaattcatctaacttagctctagttttatttgcaaattcaattgcggcatcagcagaaaaaatatttcttctagttggtgcaaaacctaatttaatttgttctaaaaatttcttattaaccatcttaatttcctccggatttaatcttgcatccgcttacagttaaaaattaatcgattaaattcgaaatttcaataacatttttactaaactaggctaaattaagtatttacattgactgacgtttaattagcttagttgatactaatgttttttgagtcagccattccttattatcaatttgagcaaaaatctgattaaccgcttgatcaaccatttgcgtaattggaacatggatggttgtcaattcaggcaagatcatagtatcttcactaatatcatcaaaacctataatagcaacttcttctggaactttgattttatactttcgcaattctttgataaagcgcaatgccatatagtcatcttcacaaaaaatagctcgtggtaatttcctaacttgttcttcactcaaatcgtaattaggaatcagagttgttgggtcaacactataaacatttgcagcatcaatttttaagttagcttcatgaattgcttttctaaagccttctcttcgatacaggaagttagaaataattttatttgaggctacatagccaatgtcggtgtagcctttttcagcgatatactttcctgcaagatatgcaccttgtttattattaattgatacaaaatcggcatcaatattttcgtagtaagtatctaaaaagactacgtgcttcaaattttcattgataaaggtcacttgtttttcatctaaatctgttgccaagacaatagctgccttgactgaagccttcaattctagtatttcttcttttaaattctcagatgaaatagtagttatctgcaattttccgccaaatccagaaacattttgcgttaaatctgctactaaagtatcaaaaaacggtaaacttgcataattgcgatttaagattccctttttatcacttaccataatcaaatctaagacggcttgccgtctaagaccacctttttttctttttcttagaggagtatatccactttcttcaataactttgaagatcttttttcgggtttcatcgcttattccaggtttattatttagtgctaaagatacagcagatcgcgaaacttttgccatcttggcaatatcgctcatttttaaagccattatttacctcctatgtttgttcaaaattattataaatctttttctaacataaactaaaataatattttaatttagttgtatgacagctagttatgttaatctcaaaccgaaacaagatttatttgaggtgaataacatggaaatcttagatttaaaaaagaaagcagttcagttaagaaaaaggacctgggaattaatttataaacaccataatggtcatacaggctctgatttatcatgtactgatatcctagtagctttgtactacgatgtaatgaatcaaaatgctaagaattttggtcaaaaagatgttgatacctacatccaaagtaaaggtcatgcggttgaaatttggtatgaaatcttagccgatttaggatatatcaatcaaaaagatttagatgaaagatattctacttttaatagtccttatattggccacccaactacagaagtacatggtatggcatttcatactggatcgttaggtcatggtcttggtcttggagttggtgttagtttagcagctaaaatgaatcactctcaaaaacacatctacgtcctcatgggggatggtgagcaagccgaaggttccatctgggaagcagcgatggcagctggaaattacagtctcgacaatttgactgcaatcgttgaccacaatgatttgcaaattagtggtactactgactcagttatgcgttcaaatccaatcagtgataaatatcgagcttttggttgggatgttcaagaagttgatggaaataatatggaagcgctagtcaacattctaaataaagcaaataatactaataaacctagattgattattgctaataccgttaaaggtaagggtatcaccgtagctgaaaacagagctgactggcaccacaagattcctagcccagaagaatatgaacaaggtattaaacaattaaatgcacaaatggaggccctagaaaatgaataagattgatgaaaaattgactgccaatcaagcaattgcaaattgtttggatgaagaaactaagaatgacccaaatttgttagttgttacctgtgattcacgcggctcagctggcttggttcctttcacaaataaatatcctgatagaactgtagaaatgggaattgctgaacaaaatgcagttacagttgctgctggcttagctcatgaaggaaaacatccctttgtcttctcacctgctgcctttttagctatgagatcaatcgaacaagtcaaggttgatgtagctttcaataaaaacaatgttaaattaattggtatttctggtggcaattcatacacctggcttggaacaacccaccactcattaaatgatgttgctattactcgagcaattccagatttagaaatttaccaaccatgcgataaataccaagttagggctttattcaaatatttagttaaatctgacaaacctgcatatgttcgtattggtaagagaaaattggacaatgtctatcatgaagattttgaatttaagcctggaaaggctaaagttattcgctccggtaaggatatctgtttaatttcaactggtgagactctctattttgctttacaagctgctaacaatcttgctaaacaaggtattgatgctgaagttgtcgatcttggctcaatcaagccacttgataccgaaatgcttggtaaactcgctcaagaatttgaccaaattgccacagtagaagaacacgatgtaatcaatggaatcggttcagcagttgctactgaagttgcaaaatatgctcatgccaaattaactattttaggatttccagatgaaccagctattcaaggtacacaagatgaagtcttccattactatggccttgatgccgaaggaattgaaaaatctattagaaaagttcttaacaaataaagctggtgatttacatgccggggaaatatattctagctgttgatcaaagtactcaaggtacaaaggctattttagttgatcataataatcagattttctataaagtagcattgccccataagcaattagtaaataatcaaggctgggttagtcatgacttagatgaaataagacataatttatatcaacttttccgaaatatattaaaaaaggtaaaccctgatcaaattgaagctttggctattaccaaccaaagagaaagtgctgctgcctggtcaagacatactggcgaaccgctttgtcatacaattgtctggcaagacaataggactgaaaagttgattaatcgaattgcctatccagaactaaaagaaactgttaaaaacaaaactgatttagccttatccccttactttactggagcaaaatggggctggatgctattaaatgagccgagagtgattcaagctagagaaaatgatgatctttgcctaggtacaatggatagttggcttttgtatcaattaactaataaacgatcctttaaaactgaaccatcaaatgcttgccgtactcaattgatgaatattcatacaggaaaatgggatcaacaattgtgtgaaatttttggaactaatattaatgaacttcctgaaatcgttgactctaacgctcattttggaaaaacagatttattcggcttactcaaaacccctattccaataaaaagtatacttggagactctcaggctgctttatttgctcatggatgttttaatcctgaagattttaaagtgacttttggaaccggttcttcagttatgcttaatataggaagcaatctcccctcaaatataaataacaaattaaacacttctattgcctggtcattaaatggaaaaatctcctatgtattagaaggcaacattaactacgccggtgcaagcattagctggttaaaagataaagtacaactaatcaacaaacctgaagaaactgaaaatttagctttaaccgctaaccctaaagatcatacaatattaattcctgcatttgctggtcttggtgctccttattggaaagctgaagcaaaagcagcttttgtaaatatgaccgctacaactggaaaaaatgaactagtaaaagctacattaaattcattagtttaccaaatttcagatattctaagtcaatttcaacaattatatcctaaagtcaatcaggaaattcataccgatggtgggatgatccataacaaatatttgatgcaatatctctgcaatatcacccaaaaggttgtcaaaattgctgatatccctgaactaagtgcattaggtagtgccatgaatgcaagaaacaagaaagaacaagctcaatcttctaaatcatttacaccaaagatgaaatctgaaagtgcaaagttttacttaacagaatggcatgattggattgacagattttaaaagaaaaaattaacctatcaaaaatttaaaccatcttttgatgttttatcgaaagatggttttcttttgtatgaaataatattaaataaaaacatttgttcgcacagaggttttctagtaaaattttatatcagagcttagttaaggcggccacctccggttgtttggaaaagaggtgatgtgtatggttcaaggaatcataaatcgtttatctttttcagagaggaggaaattgttattttctcctggcttgaactcttaatcgagttaggtcatttatggctagattttcaagcctataaggaccgaaaaaagtcagaaaaaataaccgtcttaactgtagcaagttgaaactgacggttataataaaaataattattaaaaaataatcggaagcggatgcttaagctccaagaggcaccatggcattggtgcctattttttacttcttcagtaatattttatgatgaaatatcgttttagccaatcatgaaatcaatccaatctcccgctttattatagctacatctattaacagaaatattagtcctgaagatatgtctaaaataaaagtagttttggaatcaaccccacttttatcagaacgaaattaagaacaaaaaatagcctagttttaaacactaatctattttttattgagttagtaattctatctcaaagcttaaaatccttttctttaacttattaatccacaaaaattagagattaaattccaaaatatatcaataacattagttaattctcatatattttataattaaagatgctggaaaccgatcttaataccatttgttctactaatattttcagatttactaatttttaatagcaatacttattatggaccataatatttttcttacataaaatttacagaaaaaaagcgtaacatcaatatctgttgcgcttatagtatacatacaaaggagtgtacaggatttgaacctgcgcgccgaaaaaatcggttcgccggatttcgagtccggtgcattaccactctgccaacactccatgactagattccattatagcgaaaaataacttttaagtctaaaacttttgaaaaaaatatgcctccttttctaatttctgttaaaataactaggaatgaatgcgaggtagttatcgtgaatttatcctggctaattgcccttgtaataagtgcaacgattttatttactttgatttataaacttgaaaattcaagaaaatttcgccatcttgatagcagttggcataagcgtttaattcaaccagttcatggccacttttggtcaataattgagttcttaaacgaacctaagctaatcgctttttgggattgtttactagctctaatcttaattcttaatggtgaaataaaaaaagcaatttgggttttagttaccttagcttttaccgacattatcggtattattttgaagcacagtattaagagagaaaggccaagtgaaaataatcggcaatcttattcatttccgagcggtcacgttttaagtatcactagtttaagcttaatcatttggcaaatttatggtggactgtttggtattactttatttctaggcttactagctctttggtttttagttgttttttcaagaattgtcttaaaagcacattatccatctgatattgtgggagctactgctctctctgttttttgttttttattaacaattccctttcttgcttagacaaaaaagctccgttgtataacggagctttttcttaggtttttatctagcagtttgtaccttatagtaaaaaatcatcttttggaaagattgtagctagactaaattagtgggagacagtctaactacaaattagaaatgtttcgaataaatactagcatattagggggggagctagtgtgggtagaataattgcttctaattggagttgtgggagtcctttccatcaatgaataagattaatgatgaatgttttgactattaatccagtttttacctcatcgtttaaaaactgttatttaactaactagaataattttgtttcactcttcaagtcaaaaagctttaattccttgaaactgtagtatattttaacaagttttcttcttttaaacaagtaaaatatcaatataatttacctatcctttattctgatagatatagttttatgatgagatgttatttatttagttattttattaatcaataaaaaagtggcctaattttcaaagccaaccattaaaccgcccttttctgcataaaagctacaaagtccatgacaaataccaatctctatttttgcatcagggaacttttctataattttttccttcagactctcagcatctttttgattatcaacatgatcaatatagaccttgccacctgaataattttgtttttccatgtttttaaaaagttccaaaaccgtttttttactgcctcttgcttttcctaaaggttctaattttccttctttacttgcttcaccaatcattctaatgtgcaatataccagcaattttagcagttgctgaactaatgcgaccatttactgccaagttatgaagtgattctaaactaaacaataaatgagtattttcttgataagtttggaaactttcgcttattgagctaaaactatccttctgaagcaattccactagtttatctactaataatttaagttctggtccagctgatttagaatcaagtactaaaatttcgctacctggattttcctcttgatatatttgtgctgcttgtttagctgaagaatatgttccacttaaaccgctagtaactgttaaaataacagcttttttgcagcctgctaacgcatcaagccattcctgtaaattaggacatgaagttcctgatttttctttattttcataaattttattcaaaaatacatcataatccatttgatcattatccaaaaatgtttggtttcccaaattaattgttaatggtacaactgttaaatttctttctgaatctgatttcaagttgcaacttgaatcaactataagtttaatttcttccatagttttctcttttttgtttactttcgttaataaaaatccctttatcggttttttaataaccgatagtgctataataatgtctattaaatataaaagtcaagtcaaaggagttattatggaaaatttatcaatcttaaatcaaattcaaagtgatgttgacaacttttcactccctgcctttagtgagattccagatattggactttatcttgaacagacctgtcaatttatcaatcagagtttatcccctttttctagtttatatttaactaattcaatgattagtaattacgtaaaaaaagggattattgaaaagccaatcaaaaagcgttacagtcgccaacaaattgcacgcttaatttttattgcatttgctaaacctgttctttctcttgataatctaaaagttgctataaagatgcaagatgaaagttacagtattgatattgcctaccaatacctaagagaagaaagcattaactgtttggaatatgtttataaactaaagaagcaactagataatattggaacaacccaaactcctgaaaaagaaattttgcgaaatattattttggctgcagttcacgaaatctacttaaattcttatttttcggtaatgaaataatttattaaatcaaatttttgataaactattttatgacgctattgtagatatggaggaaatgtatggaatcacaattgcatggtcttactgctactgaagcagctaaacgtttagaaaaagacggtcctaacgaagtaccagagccagaatttaacttttggaaagcttttttatccaagttatggaatttatcagcttggattttagaggctgccttattacttgagttaatcttaggtaaggggattcaggcagggtttgttttattaatgcttttatttgccgcatataatggtgcaactcaaaagaaaaaatctcgtcgcgttttaaatgatatttctcacgaactaactcctactgtcgctgtagaacgtgatggcaaatggattaagttaaattcaaaacaattagttgttggtgacttaatcaatttaaagcgtggagatgttttagctgctgatgttattttaaaaagtggcaaaatcacctgtgatgaaagttctataactggtgaatcagctcctgttaacaagcaaataaatgacactgcatatgccggaacaacagtagtcgatggaactggtttagcagttgttagtgcaactgggtctaattcccgttcaggtaaaactatcaatttaattaatcaatccgctgctccaggacacttacagcaattattaacaaagattattttttatctttgtatgcttagtttaagtcttacaatcatcattattattgcagcttttgcaagaggtgaaggcttagatggagtaattcaaatgttgcctttccttgctatgatgtttattgcttcaatcccagttgctatgccatcaacttttgcaatctctaattcctttgaagcaaaaagattaagtaaagaaggcgttttgacatcagatttaactgggattcaagatgctgctaatttaaatctgattttactggataaaactggcacaattactgaaaataaaacagctgtatctagtctaactaacttgagttcattaacagattctgaagttctacagcttgcagaagctgctactgataagcgtaatacttcaattattgatgaagcaattattgactatttaaagaaaaaaggtctggcttcattaactcctgataaatttaccccatttacttccaatactggttattctgaagctttagtaaatggtaaaaatctgaaacttggttcatttaagcagttatctttaattgatacccaagccaataaccaaattaaagatattgactttacagctggtcgttcagttgcactattagttgatgataagttagccgcagtctttattttacaagataaagtaagagatgattctaaagctgctttggcagagctgaaaaagcgcggtattcgtccaattatgctaactggtgataaccaaagaactgcagctgctgtagcaaagcaagtttcattaactggaaacgtaatttctatccatgattttaatgaacaaacagatttagaatctcttgctggtattgctgatgttttgccagaagataaacttaaaatggttaaattcttccaagaaaaaggctatattgttggtatgaccggtgacggtgttaatgatgcccctgctttaaagcaagctgaagttgggattgccgttgctaatgctgctgatgttgctaaacgaagcgggaagatggtattactagatgatggcttaatgccaattgttaagattttagatgcaggccatcgggtttaccaaagaatgacaacttggtcattaactaaactttcaagaactgctgaattaactatgattttaacctttggctacctactctttggttatttaccaatggctttaaatgctatggttatctacaccattatgaataatatggttactatgatgattggtacagataatactcatattacatataagcctgaaaattggaacatcgatcgtatggcaaaggtttcaatgtcccttgcttcaggttggacaataatcggctgcttatttgtttggttcatgaataataagttaggctttagtcaggggcaagttggaacaatggtttatgtttattgtgtattaagtgcaatgttaattgtgttaatcactagaactaagacctacttttggcaatcatatccatctagattagtgggtactgttcaaattatcgatgttgctttaacctttgcattagcactgttaggaattgcaatgacacaaatttcgctagttaaccttggtttagttattgtagtttcgctagtaagtgccgtgataattgatctaatttaccaacccgttatgaaagacagataatctcataatctttgcacacaaaaaagctcacttcaaatgaagtgagctttttaataaccaaaattaagcgccatggtattgaacaagtgaaaagatatcaacatttggcaacttttctctaccctttaaatcaggtaattcaacataaaaagctgcacctactacttctccaccaagacgttcaatcaattcaatagcagcatgtaatgttccagctgtcgccatcaagtcatcacaaataacaaccttttgacctggcttaatagcatccttatgcatttccaaactatttgaaccatattccaaatcatatgatgctcgttcaacttcacgaggcaacttatgaggttttcttgcaggaacaaatcctactcctaattcagtagcaactggacaacccacaataaacccacgtgcttctggcccaacaattacatctgcaccacgctttttagcatattctgctaattcatgagttgcagctctgaagatttcaccatcagacaagattggggtaatatcccgaaaaacaattcccttattagggaaatcctgcacgcttgcaatatatttcttaaaatcaactgtcatgttgataacgacctccgttattttaaatgctggttaacatacgctagcaattgactagacggcatggttctcaaacttgttacaaattttagctgagattgcgttcctaaaaaataaagcgaatctgttaattttttatgattagctgccttatttggaacaagttctgccttatccattttaacaaactctagctctaaaaacaccctcaaaataaagtaaatgctatcaccatcaaggccaaggtatggagctacgaggcgataatcttctggtttaagattaggatgtgaataaacatattttaaggtattagcaaactgtgttctacttggcatcaccctaattggcaatcgatcaagcataaaacgcaaatataattgttggtaatcattttttaaagcgtaatctaattcttgacgattgtgtggtgcatcaagtaaagttacaatttcaccactgccattataatttttggccaaaatgattttatcttgatcaattcctaattgaccaactgctttatttaaattatgttcatcaaataaaacaaaccgatcagcaaaacctaatatgtgtttttgatctcggaaatcaattgccttggtctttcccaaagaaaaacttggtacaccaaaatcaattgcttttagctgaccttgtaaagaaagctttttttgccacatgtttttaccaatattcaaataaatcgctgtaacatagggcaataaattctgagttaaaaaggccatattaaatccgattacttttagatttccaacattgaattttagatgacttttatcttttccgattacaaaaagtgaagaaatttcaggctctttgacacaatataccggttctggattatctgttccaaaaggtccaacttttttcatatcatctaaaatcgataaatcaatattatttacatctaaatctaaatcgtaataatcaacttcagtatttgaacttgcttgataactattttcaaatgcctttcttaaaggattaatattttcttcttttagtgataaaccacaagcaaaatcatgcccaccaaagttttcaaatagggaatcctttaacttaaataaggcattaaacaaattaaagccagcattacttctacctgaacctttaactaagccttcatcattttgggtaagtaagatagttggtttatgaactttttcgactattttattcgcaactaagcctaataccccttcatgccaactagtatcatacaatactagggtattttcgctattatatccaaatttttttatttgctctaaagcagactcatatactttttgagtcaattctttacgatcattatttaattgttcaacttttttagctaatttctgagctacttccaaatcatctgccaaaagcaaatcaactgctaagctagcatttgctaaccttccagttgcatttaatcttggggcaatttgaaaaccgatatctgtttcatcaatatttccaagttcaagtccagcttctttaattagtgcacgcaaaccaggccgttgagtatgattaagcagttctaggccacgcttaactataatatgtccttcccctgatacttttaccatatcaccaattgttccaatcatcgctagttcaatcagttctggcatagtatcatccattaaagcacgacagattgtataagcaactcctgctccacaataatcatcaaaaggatatttttgatttggataattacaatgaacaattactttagcgtctggcatttgctcttgaaagctatggtgatctgtcacaataacatcgcagccattttcctgagcatactttacttcttcaattcctgttaccccattatcaacagtgataattaatttagtaccatccgatactatttgctggtaacgtttcatatttggcccatagccgtctttaaatcgatcaggaataaagtaatgaacatcagctcctaaaatggccaatgtttcatacatgatagttgtagctgtaataccatctgcatcataatctccataaattgtaatcttctcaaaattatcaattgccttattaatccgctcaacagcttcctgcatcccatgcattaaatatggatcagctaaatcttcttcagtaccattaagccaataatttaatttttcatctgtattaatctctcgcaaagaaaataacttagccgcaagtggactaagttgatatttctcttttaattcttcagataattcagtagcttctctttttttccaagtcattattttaatttaaatacactcaaattctttgttgttgcttttttcgtatgaattaattttccgcgcacagcccaacgatttataccaccgtctgcacaggtaattaaagttacaatctttttcttggtattattaactagccaaacagctgtcggatcaacaactcttttcatataaattctatatacatagactttctttaaatcagtcaaatataccttttgacctatttttgtatcttcaattggtgaaaatagaacgcctttagctgtcatatagtgtccggccaaaggataatttccttgccccatcacttgatcttccctcatcgttccagcacctgtagacaatgaatcatcactcaatcctaacaagattggtaaatacaaattaaccttaggaatggcaatcgcgccaatagcatttgatgtattctttacacgtgatcgagtaactttagcaatatcaatatcttggactttgctgtaatcaaacataccttttttcttctggttagcagccacctttttcttggttagcccttgcaaagttgaagtttgattttgttttacaaagtactcttgaattggaccattaaaaactaaaataatccctacaataaataaaataactgctaaaactcggagaaagacagtctttttgctagccttagtttttttatttaacttttcttttttaacatctgtcattttacttacccttgatgtcatcatcattcatcttcaaaactgccatgaaagcatcttgaggaacttctacttttccaacagatttcatccgtttttttccacgcttttgcttatcaagtaattttgcacgtcgatctgggtcaccagtatggatacgtgctgtaacatctttacgatatggcttaatagtggcacgagaaatgatcttagccccgattgctccttgaatatcaacttcgaagttttgtcgaggtattaacttcttaagcagtgacgtcatttgacgagcacgtgcttgagcatcagatctatgcgcaataaaacttaaggcatcaattggctctttattaagtaagacatcaatttttactgagtcagtagcacgatatccaataatctcataatcaagtgatgcatagcctttggttgaagacttaagatcatcaaagaagtcaaaaataatttcagctaatggaatatgataaatgacatttactcggtacttatctaggtaatccattgtttgaaattcaccacgttttcgctgacaaagttccataacaggacctacaaagtcattaggtaccatgatttctgccttaacataaggctcttgtacttccttatattctcctgcatcgggcaaatctgaaggattatcaattatttttgtacttccatcattcataattgcatgatagtcagtagatggcgctgtcataattaaatcaagattgaattcttgttccaatcgttcctgaacaacatccatatgaagcaagcctaagaaaccacatctaaagccaaagcctaatgcggttgaagtttctggctcaaattcaagcgcagcatcgtttaactggagcttctccaaagcttcctttaaatcatcatacttactattatcaactggatacatcccactaaagaccattggtggaatttgacggtaacctggtaaagcttcttcagttggattttgagctgaagtaatcgtatcaccaactcgagtttcacgaacagatttaatattagcagtcaaatagccaacgtctcctgcaactaatacatcttttttaacaggatgcggatttgaaacacccacttcagtaacttcatactttttgtgagtattcataatttctatttcatcgcctggtttgaccattccatcttcaattcgaacagccaaaacaacgccgcgataatcatcatattttgagtcaaaaattaaggccttaagtggtgcttcaagattgccttgaggagcgggaatatcagttacaattcgctcaagtaaatctggaatacctaagcctgtcttcccagatacttcaacggcatcacttgcatcaagacctagcatctcttcaatttccatcttggcattatcgggatcagcagatggcaagtcaatcttattgattacaggtaaaatttccaaatcatcatcaattgctaggtaggtattggctaaagtctgagcttgtacaccttgagaagcatcaactacaaggagagctccttcacaagcagctagagaacgtgacacttcataagaaaagtcaacgtgtccaggcgtgtcaattaagtgaaaaatatagtcttctccatcttttgcatgatatttaacttcaactgagtttaacttaatcgtaatacccctttgacgctccaaaggcatatcatcaagcatctgactcttaagttgacgttgagcaacagtatctgttaattccagaattctatcagcaatcgttgatttaccatggtcaatatgggcaacgattgaaaagttacgaatatgtttttgataatctttaagttttttgaggtccataaagttccatcctttttagtctattcctattatagcaaatgggcataaagggacaaataaaaagctaaaatctgactaatattttgttatatattaattcaagtaagtcaatgaacaaaatttattaattacataaagaaaaaaagagctttaaaagctcttcttatctatttatcctaatttatctttcaatctctcgaagaagttcttttcctggggagttattgaatctcccccagccttaacaaaatcaaccaaagcttgtttttgcttgtcattaattgacttaggaattactacttcaacagttgaaatttgatctcccttaccatcgccgcgaagatatggcacaccttcaccacgaatcgtaaacttagcaccaggttgagtaccagctgggatctttaaactagtttcgccattaacagtcttaatctttatttcatcacccaaagttgcttgtgcaaatgagattggaactgttgtataaattgtattgccacggcgagtaaagtctttacttggtctaattctaaagacaatatataaatcaccgtaagggccaccatttttaccagcttcaccttgaccacttaagcgaatttgttggccattatcaatacctgctggaatcttaacttctagtgtttgcttcttatcagtgtgaccggcaccatgacaagttgcacaaggatgttcaatgataacacctttaccatgacacttatcacataaagtttgtctctgaattacacccagcattgattgttgggtaactgtcatataacctgaaccatggcacttatcacaagtaataggatgtgtgcctttttctgctccagtaccatgacaaacttcacatgtttcacttctagtgtaagttacgttagaagtcttacctttaatggcatccatgaagtcaattgtcattgtatagtctaaatcgtcacccttaacaggggcagttggatcaacatgtctttgactagctccgccaaaaatatcactaaagatatcaccaaagccactaaagttgctaaaatcaccatattgaccactaccggcaccatatccagcttgaccatttacaccagcttggccaaattgatcatattgtgcccgcttttgtttgtcgtgcaaaacttcatatgcttcattaacttctttaaatttttcttccgcatctggggctttgttaatatctgggtgatatttcttagataacttacggtaagcacgttgaatatcttgctcactagcatttttatccaagcccagaatatcgtagtaatcgcgacttgtcgccattttctaacgctccttatcatttgataaaagaaaaggactaaaattagtccttaactttccactattatagcattacttgtcagggtttaccttcttgaagtcaccatttacagtgtcaccgttattgccatcgttgttgtcattgttacctgatggatttggtccagcttgacctgcttggtcttgtgcaccattagcttgatataacttaacagctaaatcttgggcaaccttagataaagcatctttcttttccttcatttcatctaagttgttatccttttgtgccttcttaaggtcttccaaagcatccttaaccttagatacttcatcagcaggaaccttatcgccaacttctttcaaagtcttttcagtagtgaagattaatgaatcaacttcgttacgtaagtcagcttcttctttcttcttcttgtcttcatcagcgtgttcttcagcttctttttgcatacgcttgatttcttcatctgataaacctgatgaagacttaatagtaatcttttgttccttaccagtacccatatccttagcagatacatttacgataccgttcttatcaatatcgaaggtaacttgaatttgtggaacaccacgaggtgctgcaggaatgtcagttaattcaaatctacccaaagtcttgttatctgctgccattggacgttcaccttgtaaaacatgaatgtctacagctggttggttatcagcagcagttgagaagatttgactctttgaagtagggatagtagtgtttctatcaattaacttagtgaagacaccacccatagtttcaataccaagtgataatggagtaacgtcaagtaaaacaacgtccttaacatcacctgaaataacaccaccttgaacagcagcacccatagcaacagcttcatcagggttgattgagtggtcaggttctttaccactccacttcttaactgcttcttgaacagctggaatacgagttgaaccaccgtttaagataaccttgtcaatgtcgttaacagttaaaccagcatcctttaaagcattatcaaatggaatcttagttctttcgactaagtcatgagttaattcatcaaacttagcacgagttaagtcggcttcaaggtgaagtggaccactttcgccagctgaaatgaatggaagtgagatgtgggttgaacttacacctgataagtccttcttagccttttcagcagcatcctttaatctttgaagtgccatcttatcctttgataagtcaacaccgttatctgccttaaagttttcaatcaaccaatccataatcttttgatcgaagtcatccccaccaaggtgagtatcaccattagttgaaagtacttggaagacgccatcacctaattccaaaacagaaacgtcgaaagtaccaccaccaaggtcgtaaactaaaatcttttcgtcttcttcatctttatcaagaccatatgcaagtgaagatgcagtaggttcgttaataattctttgaacgttcaaaccagcaatcttaccagcatctttagttgcttgacgttgtgagtcattgaagtaagcaggtacagtaataactgcatccttaacttcttcaccaagataatcttctgagaacttcttgatgtattgcaaaatcattgcagaaatttcttgtggagtgtagctcttgtcaccaactttaaccttgtatccagcttcacccatgtgacgcttaatagaaacaatagtattagggttagtgattgcttgacgctttgcaacttcaccaacttgaatttctccatccttgaaagcaactacagatggggtagttctattaccttcagggttagtaataatctttggttctttaccttccaaaacagcaactgctgaattagtagtacctaagtcaataccaataacttttgacatatcaaaaagtcctttcttatttttatttcttttatcttttataagcttaattaattattgagcaacaataaccattgctggacgtaatgtccgatctttatattgataaccagcttgcaaaacttgaacaacatgatccttttgttcatcattttctgcaaccgttgtttgaacagcttggtgtaagttaggatcgaattttacaccctctgctttaatttcagtaataccatgatctgccattgctttaaccatagcatctaaggtcatctcaacgccctttttcaattgcttagaggcttcatcgtctactttgacacttaaagctctttgcaaattatcaacagctggtaaaatgtcctttgctaatgattgtgattcgtacttaataagttgagcacgttctttattgtagcgattttgcatattttgaatttcagcttcactacgtaaatatttatcttcaagctcagctttttcagcctttaacttttcaatctctttagcaaaattttctccaactttttgggtatctttatcagccttaggtgaagctgtttttgcttcttcatgctttacatcttctttaggcttttgatcaaggtctttttcacttggaaattcttttttactcaagaccttccctcctttactgaaattttccgtaataatcgagtagtttcttcgctaattcctgtctaaaatattccattaagccaatcatttgtgaatatggcatattcgtaggtcctaataaggcaatagtgcctcgtccatgacttcctacgctataacttgcagttaacaaactataattcttaagcaagtcacttggtagttctgaacctaatttaacttgaacagggaaatgcttatcattgccatccccctcaaaacttaataaactgctaatcatatcattttggtcaaacatctcatagagcgagcgaatatcttggacattccctgttgcattattcaaaagattaatctgaccatcaacatacatctgttcacttgcagcatcttttaagacgtctgatagtaaacttaataaatcatcagcattaccacctaattggcgatttactaactcactaagcatttctggagaaacggctgataaacttttaccaactaattcatcattaattaaacgaacagccttttctatttcttcaccattagtaaatcttggcaaagaatatacttggctttgaacatttccattatttgtaaccaagattgccattacttgccgattagataaaggaactatcctaaaacctgttattagaacatgacgggattcaggtccttctgcaaaggcagtataatttgtcaaatctgataaaattttagctgcttcttgcacaatctcattcacttgatggaatggacgatctaactgacaaacaatctgattataaatagactcaggtagttgcaatggttcaactagatgatcaaggtagtagcgataaccatcacttgatggaatacgaccacttgaagaatgggttttctcaataagcccttgttcttctaataccgccatttcatttctaatggtcgcactagaaaccttcattggcagttgactcatcacagttttggagcctacgggctcatgcgtctgcgtgaagtccttaatgattgttttcaaaataagctcttgacgttcggttaacatattctcgacctcttaattagcactcataactctcaggtgctaacatgaataatatactaataaattagcactaatgcaagctatttgctaattttttgcataaaaaaagaactagttttctagttcttcatattatcgaaataattacgaatttctttttcgtctttaatcagttgctttttcagctcatctaaactggcaaatttaatttcgcctctggtatagtgataccactcgatacttatctcttcatcgtaaatatcttcattaaaatcaaataaatatgattctatataaatttttttgctagcttgaattgttacattataacctacactagtcattgaatcataccacttaccatggactaaagtccttgtagcataaactccaattttaggtataactttccggccattcagaattaagttaattgtagggaagccaagtttgtgaccatttcgtaaaccatgtcctacaatacctgacataatataatgacttcccaataaattagtggccaattctaagtttccatctcgaatggcttgccgaattgctgttgaaccaattttgcttccaccactagtttgttcaggcaaaataacaatttcaaatctatttttagcaaagtatggcaaattttccatattagcaatatctttaggcccataagtatagtcgaatcctgcaacaacagtgtcggcttttaattttataataacttgatctacaaattcttgaggacttaacttgctaaagccctcagtaaatggagcaacagctaaataatctacccctagtttttccatcttttttgctttttctgaaaggttatccaaatattcaaagtcagttcttcctaaataaatttctttaggatgacgatcaaaagttagtaccattaagggcaattgttttttcttcgccacttcttgtgcgcgcttaattaatttttgatgaccaatgtgtaccccatcaaaaaagcctaaagctaaaaccacatgggtatgagttaattcttttgtaataggataactaagatgaattatttccaaaatttattccttctattactattcattttgtaaaagcattaaatacggtctgtatgtatgcgatttcaattcataaattgctttgacttttttattgtagcgtaaagcaactttttttgcatcatttcttaatgaaatcgcattcccatttttaactttttgccaaattccttcactcatatcgattgtttcataatctgcaaaaaatgaatcaattggcaaaatatacttaacagctaattcaggatttttttctaattcttctaatcttattgcctgttttaaatcaaaacctgaactgctggttctttgtaaatgggtcataactgctggatagccaagcttttcccccaagtcatttactaaacttctaacataggttccttttgaacattcaatatcgaagccaaactcttcttgcccgtcttgataagtaacaggttctattagttgatatttaaagatttcaacacttctgacaggtctagttactggaattccttctcgtgcatattcataaagtcgttttccatttacttttactgcagaataaattggcgggacttgatcaatttttcctaaaaaactgtccatcccctcttgaatcttgtcaaaagagatcttttccgttacatcttttctctttaaaacttttccatctgtatcatagctatcagtagaaaagccaaacaaacctctcccagtatatgatttaggtctttcatgcattagttcgattaattttgttgcttgtccaatcgcaattggtaaaacgccctctacttctggatctaatgtaccggcgtggccaacctttctcgttttcaaaatttttcttaatttataaacgacatccccactagtcattcccttacttttattaattactaaaattccatttatcatactttcacctacaataaaagcgccctaaggcgctttttatctatcattttcttgcttttttaattgagcaattaatttatcaattttactaccgtattgtaccgaagtatctctcttaaaaattaattcaggcactttataaacagttaattcttgtcctaataagtgtcgcattaatccttttgctttttctaaaccttcggctacttctttttctttatttccttcttctgtcaataaagaataataaactgtagcataagagaaatcattagtacattcaacagcagttaaggttacgtcactcaaacgtgggtcgcgaatctttttttgcaaaattttcgacaattcacgcaaaatttctccttcaacccgaccaattctgtgtttcatgttaattctccttacttaggcttaacttcttgcatttcatatgcttcaagttcgtcatcaatcttaaggtcattgtagttttcaatagtcaaaccacaatcgaaaccttgtttaacttccttgacatcatctttgaatctcttaagagaagcaacttggccatcatagatgacaacaccattacggataacgcgaataccgctgtctctatggatataacctgaatcaacaaatgcaccagcaattgtaccaaccttagaaactttccaagtttcacgaattgttaagttaccagttaccttttcttcgtaagttggttcaagcatacccttcatggcaacttctacatcgtcaattgccttgtagataacgctgtatgagcgaatatcaacttcatcactttcagcttgtgattttgctgttgcagttggacgaacattaaatccaataatgaaggcgtttgaagcacttgccaaagtaacatctgaatcgttaattgcacctacaccggagtgaataatgtttactcgtactccttcaacatcaatcttttcaagtgattgagaaagtgcttcaactgaaccttgtacgtcagcctttaatacaatgccaacttccttcatattttcacgcttcattgtatcaaacaagttatcgagagtaacatgttgtactttttcacgttgcttttgcaaggcattttgggcacgttgttcaccaactgaacgagctgtcttttcatcttcaaagaccacaaacttatcagctgattcaggaacatcatttaaaccagtgatttcaacaggcattgatggtgtagcttttttaactcttctacccttatcgttagtcataacacggacacgtccaaatgtatttccgacaacaataggatcaccaacttcaagagtaccttgttgaactaaaatgtcagctacaggaccacgaccacgtgataatctagcttcaacaacagtaccaattgccttttgatgtggatctgccttgagttcaagaacatctgcttgtaaaagaatcatttgtaataattcttcaacattatcacctgttttggcagaaattttaacaaaaattgtgtcgccaccataatcttcaggaattaagttatacttcatcaactgttcagtaacgtggcttgggttagcacctggagcatccatcttgttaatggcaacaataattggcactcccgcacttttggcatggtcaattgcttcgatagtctgtggcattacaccgtcatcagcagctactaccaaaacaacaatatcagttacttcagcaccacgagcacgcatatttgaaaaggcagcgtgaccaggcgtatcaaggaaagtaatcaaacggtcatcaacacgaacttggtatgcaccgattttttgagtaataccaccagcttcatgttctgacacattagtgtgacgtaatctatcaagtaaagttgttttaccatggtcaacgtgacccataatagttacaactggtggtctactttcttgatgcttagattctttagaagcttcaacttctttttggtaaagattatcaatatcagaaatatcttcatgaactttttcttgtgattcaataccatattctgcagccaaaagttcaatagtatctttatcaagtgattgattttggttagtcataacaccaagcataaagagcttcttaacgatttcagctggttctctatgtaaaagcttacctaaatcttgagcattcataccttcttcaaatacaagaacttcaggtaatggacgctctttgcgcacagtctttggttttctaacttcttcgacgtgattattatgcttgtttttacgctttcttctctccatcttgtctgaatgttcattacgatgttcaaagttattattatcacgtccttttcggccaggctttccagtatttctgccatgtccgttgccatttctacgtgaatcaggttttacactttcttctggcattaccggaatttgtggtgtccgattcatagttggctttctttttggttttgatttttgattttggttttgcttattttcttcggtcttaggacgatttctagcaggagatggtttaagaattttaggtcctaatacctttttagttttcttttcttctggttgatttgtcacttcgtttgtatctttcttttgagaattttgtttttctgtattttgatttgacgtcttattcttttcttcatgccaaattttacgtgccttttcagactccttagctaaagttctctcttcagcacgttgtttttgttgaagttctgctaataggtctctagctttattgacctttgttggcttattattttgtttttgatcgttttcacgacgattagaacgacgtttatttgaagaatcattaccacgctttttagcttgatcactatgttggtgcttagcatgcttcttagcttgtgaagctggtcttctaattgaagaaacagaaagcttaattttattttctttcttttcatcatttttactcttagctggagtggaaggcttcaccttatttttcaactcattcacttctgcatctgaaagtgatgacatatggtttttaatattaaagcctaattctttagccttatcaaccaagaccttattatccaaacctaattgctttgctatttcatatattctctgcttagccatcagatcacactccttcatttaatttcttttgtattgctttactgaatcccaaatcactaactgctaaaacttttctagttttcccaattgcttgagatatttcaagctctgaaaactcatcaataattggcaagcctttcttttgggctaaagcttcgatttcttggcgtgttgccttagaaagatcactagctataattaccagcttaaccttgccagtctttatcgatgagactaccaaatctgtgccagaaactattttcccggctctttgaattagtcctaaaaaatttattatctttttacgattatgcacttatttatcaccaaataattcttttcttgccttttgatgatctacatattcaaaaagttcttgataaaaactatcatcaattttagtacctaagcttcggtctaaaattttacttttttgagcttcagttattttatcaggttctaatgaaacataggctccacgtcccggctttttgccagttggatcaactgaaacttcattttctttgttgataacaattcttaccaaatctttttttggttgcattgtattcgtcaacaaatcttttctcattgggacttttctctttttcaaaaaaatcacctattcttcattatttgttggattttcatcaccaacattttcatcgtttccattatcttcatcaacaaattcaacttgtgattcaggacgaatatcaatcttataaccagttaaacgggctgcaagacggacattctgacccttcttaccgattgccaaagataattggtagtcagggacaataaccaaggcactcttttcatcttcatcttcaccaaattgagctgcaattacttcagccggattaagagcattggcaatgaaatcagctggatcatcttcatattttacaatatcaatgttttctccacctaattcattaacgacattttgaacacgtgctcccttaggcccaacacaagtaccaactgggtcaatattaggatcatctgatttaactgcaattttagttctatcaccggcttcacgagctacagatacgatttgaacagtaccatcatacacttcaggaacttcctgctcaaacaaacgcttaaccatatctggagctgttcttgaaacaacaatttgagcacccttagtatcattacccacttttgttaccaagactctaatcttatcttgtgggttatatacttcatttggcatttggtcgccacgtggcataacagcctcaactttgtctatcatcacataaacaaaacgattatcatgacgttctacaacaccagttacaagttcatcttggtattgtgaatattcacttacaatgtgatttctttcagcttcacgaagacgttgcataattacttgttttgctgtttgagctgaaattctcccaaaatcttttggagttacttcaaacttaatttcatcgcctacttcataagctttattaatttctaaggcctcttttaagctaacttctaagcgagcatcttgaacttcatcaacaacggtcttgatagccataactttgaagttaccttttctttcgtcaaagtcaacttcaacattttgggcttgattgtaattctttttgtatgctgctacaagagcggctttaatcgcatcaacaataatttcttgcttaatacccttttcattttctaaagtggcaaaagcttctaacatttctttagtcataagttttaatcagccctttctaaaattcaattgcaaatcgagcatttgcaattgccccaacagggatttccaactctttagtccgagttttaatcttgattttcaaagtgattttatcatcatctttgcttaataaagtgccgtcaaaagccttttgtccatcaatcttttgatagcaagctacgtggatatacttattcactgctttttcccaatcacgttcatttttaattggtctctccaaacctggtgaagacaactccaacatgtaaggttcagtgaaaggatcaggatttaacttatctagttcttcagaaaccatttcacttaaagcggcaatttcttcaatatcaattccactttctccacgatcaacataaatacgtaaataatattgattttgttccttcacgtattcaacatcaactaattcgtccccacgcttctcagctatggggctaactaaattcgttacaagatcaacgatttttgtcaaaaaatcttcctccgtactaaaaagagtgagcatttctgctcactcgaattggctattcgaactacgttagatattatatcacaaattattaaaaattaaaatagagacaattgattttgatctggcattccttcaagcacaccattgacttctaagtaatccattatagtttgtgaaactttacctcttgttcttaaatcttctttagacaagaatttttgttcagctcttgctgcaacaatctgttttgctgcgttatcccctaaaccaggaactgcattaaatggtgccaaaattgtatgatcatcaacaatcttgaagttaagggcttcagattcgttaacatcaaccatttttatttttattccacgttctagacattcattagcaatttccaaaacagttaataatgacttgtctttagcacttgcatcatttccctgatcttgaatctttttaatagctgctttaacggaatttttaccatgactcatggctactaagtcaaatagatcagccctaactgagaaatatgacgtgtaataaattactggataataaaccttgaaccaggcaattctcaaagccattaaaatatatgctgtagcgtgcgctttagggaacatatacttaatctttaaacatgatggaatataccaatcaggaatattattgttctttttcaaaacagccatgtcatcatcactaattcctcgaccgtgacggacagattccattgttgaaaaggctacttctggcttaactccccagtgaatcaagtccatcatgatgttatcacgacaaccaataacattctttaatttacaagttccattattgaccaagtcttctgcatttccaagccatacatcagtaccatgtgataaaccagaaatttgcaataactcagaaaaagttgttgggtttgtttcttcaagcattccgcgaacaaacttagtcccgaattctggtacaccaagagttccagtctttgaagcgatttgctcaggagtaactcctaagatatcagtacctgaaaataatgacataacccctggatcatctggtggtatggtcattggatcgacaccactcaagtcttgcagcattctaatcatagttggatcatcatgaccaagaatatcaaatttcaagatgttatcgtgaattgagtggaaatcaaagtgagttgttaaccatgctgcattcaaatcatctgctggatattgtactggtgtaaaatcataaatatccatatcatctggaactacaacaataccagctgggtgctgtcccgtcgttctcttaacacctgaagtaccagtagccaagcgatccaactcagcagaacgcaaatttaaattacgctcttcttcaaagtgcttagcatatccatatgcagttttatcagcaacagtcgaaatcgtacccgctctaaaggagttagctggaccaaacataaccctaatataattatgggcaacaggttgatagtctcctgaaaagttcaaatcaatatctggaaccttatcaccatggaaacctaagaaagtagcaaatgggatatcttggccatctttaactaattcagtaccacattctggacattttttatctggcaagtcaaatcctgaaccgtattccccattttcaaagaagtgtgaatatttacatttaggacatcgataatgtggcgctaatggatttacttcagtaattcctgacattgttgcaaccaaactagaccccacggatccacgtgatccaaccaaatatccatctttattagatttggccaccaatttttgagaaattagataaataacggcatatccattagagataattgaatttaattctaattctatccgatccttaacaattttaggcagtggcttaccataaagttcatatgccttgttataagtcaaatcagtcatttgctgatctgcatccttaatatgtggtggataaagtccactttttaccggagcaatttcttcaatttcatctgcaatcttattagtgttatcaattacaatttctttagctacatcttcacccataaagttaaatgcatctagcatttcttgagttgaataaaagtgaagcttgggttgaggcttattacgattaggatttgatctttgcgctgcaattaaaatctctcgataaattttatcctcaggatttaggtagtgacaatcacccgttgctacaacaggtatatttaattcttgacctaatttatagatattctttagaatttcctccaattgctcttcgtctttgattaattcatcagctattaattgtgaatatgcagctggcggttgaacttccaagaagtcataaaatctagccttttctcttgcttcatcatagcctttttgcatcatggtgataaatacatcacccttccagcaaccactaccaaagagaagaccttcacgatactttcttaattctgatataggggttctaggctcacgataaaaatactgagtgctggccaaggaaactaacttatacatattttttaaccctttttgtgtcagggctaaaacagtcatatgagttggtttagcacgtttatatacttggccaaacttagcataatcattcatttttcctaaatcatcttgctcaaacttgtcattaaatgcatctaataatttaaacatcaaataaccagttgcttccgcatcttgatttgctcggtgatggtgttcaagaaccacattatactttttacaaagtgaatcaagagtatgctttgtttgctcaggatgaagtaatcgagagacttcaagtgtgtcaacgactggctgtgtaatctctttcaagccgcttcttctcagtgcagcattaacaaaccctacgtcaaattgaacattatgaccacaaagtggacgatctccgtaaaactcttgaaatctctttataacttctgcttcatcatctgcttttgaaaccatctcatcagtaattgaagttaagttaattgtggtttcacttaacggatgatgaggatttataaattcatcaaatctttcaatcacttcaccatctttcatttttacggctccaatttcaattattgtgtcgtacacagatgaaagccccgttgtttcaacgtcaaaaataacaaattcacgattttcataagtcatagaagctggatttaaaactaataaagcatgatcatcaaccatattagcttctaagccgtacaaaatcttcatcttttgctttttaccagcgctataggcttcagggaatgactgaacatctccatgatcagtaattgcgattgctttttggccaaatttttttgctgtagagataaaatctgttgcagtatttgttgcatcaagctggctcatgatagtatgcaaatgtaattctacacgcttaggttcttcttgatacttttctgtacgaccaacatgttcaacaattttaaaattattaatattgaaaacaacatcatgcacatattggtcatctaatgcactaccagacattcttgcccaaactcccggtttgatacctttgagcatttcaatttgttctttatctttaacaaattttttgaaggcaatagaatctgaatagtcagtaatttctcctgaaaaaataaaggcacctgactttaattcatgagaatcaatattgaagatatttccttcgatggcaatatttctcatcccatcttcaatttctttcattccaattacttcgctagctggaatatccgccttaccaaagttcttttctcgtgtttgacgagtgctgctttgtaccactctttttggcttggctggaatatttttaaaagcctcattcatgcttttttcatgttctgcttgtaactgctctaattgttctaaactagccaaatttgcatcttcattagcatttttaacttgtaacttcaattttatattgaagaaaccatatttacgcaaatcaaaactcaaattatccaagtcagattgtgagattgcatttgcaagcattggcgtctcaacctcaattatccaatcacttgcaactttaactggctttttgctagataaacattcacgagccattgctgacatgttttcagtttgacttacaacgtatgaccagtattcaggcaaataattatctgaaccatcagccgttgaaatcataatattaacatcaatgaacggactaaattcctgctctgcgagcttaactaatgcttcataagtatcaaacttaagtggtgtatcaaaaaaaacgtggatatcccacttacgcttttttccgtaaacatccacgttttcgattttcccctttacgagtaaatcattatcactaaaagagtttggaaacttaatctgcttcaaaaatcttaagaaaagtttatttgaatctgccacaaattttaccttaatccaattcttttgctacaaaagcttcaagatcgtcaactgatatttctactgctttgtcatcagtaggacgcttaacttcgacgattccatcagcagtctttttaccaatagtaattctaataggtgcaccaactaagtccgcatctgcaaacttaacaccggcacgttcttttcggtcatcatataacacatcatacttctctgagaatttagtttctaaactctcagctaatttagtttggtcttcatcattcatcttcatttgaattaaatgaagagtaaatggtgcaatttcctttggccatgcaacaccgtgttccgtcaagttttgttcaactgctgcagataacattcttgttacgccaataccgtatgaacccataattacaggttgtgctttaccattttgatcgaggaaatcagcacccatagtttcagtatagtaagtacctaacttaaagatgtgtccaacttcaattgaagtagtaaattgaagtggtaaatgatcaactggatctggttcaccttcatttgcagttctgatgtctgaaaattcatcaactttaaagtcacggtctaaattggcgttttggaattgatagccagtttcatttgcgccaacaacaacattatataagcccttaactgtttcatcagcgataaccttgtcggcccaatcagccttaactggacctacgccgcctttttcgctaccagtaacattaaccaattcttcagcagttgcttcacgaacttcattggcatctaataaatggcccaattttacttcgttaatttgcttatcagcacgaatcaaaactaaaatcttttggtcatcagccatgtacaaaatactcttcacaattctagtagcaggtacatgcaaaaattcagttaattgatcaatagtttcgcaacctggagtagcaactttttccattgtcttcaattcttcaggctcttgtttaaaggtatcaatactctttgccatttcaaggtttgctgcgtaggtacctttttcattagtagcaatagtatcttcaccaattgctgctggagcttgaaattctgttgagtttttaccacccattgtaccagagtcagcaataacagggtgaacagtaacacctgcacgtttgaaaatacgcttgtaagctgccttttgatcatcaaattgcttatctaattgttctctagtagctgcaaagctataaccatcaagcattacaaattcacgaccacgcaataacccaaatcttggacgattttcatcacggaacttagtttgaatttggtaaagagcaagtggcatttgcttgtaactctttaagtttttagcaatgatttcagtaaatgtttcttcatgagttgggcctaaaagactatcacgaccatgacgatcttttagcttaaacatttcatcaccatatttatagtaacggccagattcttgccacaatgtagcaggcaataaatgaggcataatcatttcgggaacattaatccgatccatttcttcttcaatgattctttcagctttacgtaacacacgatagcctaaaggcaagtatgaatatacaccagcggttacctgacgtatatatccacctctaatcattattttatgacttgctgctactgcatcagcaggagcttcctttaaagttggcataaaaaaattcgattgtcgcataattaactccctaaataatttatttaataaagtagcgataaatgtcgttacctgttactaatataatcaaaattaataaaaatacaactcctgcaatttccactgcagtttcatgttcttcaggaataggctttccacgaatcagctcaactaagtttaataagagcttaccaccatccaatcctgggattggaagtaaattcataattcccaaattaattgaaatcatagctaaaaaaactacaactgctgaaagtccaaacttacttacttgactagtttgtgaataaatccctaccggtccagataacttgtttaagctgaaatggctaattaaattaccaaccgctttaaaaatcaagccagttgtatttacagccatattccaacctcttgctaacttaacagaaaaacgttcatcagatttagcaaatataccaatttgatatactttttcgctattacgtttaacaagcttaggagtaagagaaaaagttttaattccacttgctcgcttaactgttacctgcatttttttgcttttattttcagctactttttttccatttacagcaattatctgatcgtttttctttaaaacagtacttgctggcgaatgttctaatgttctagcaatagttgttgtcgaggggccaactgttgagattgaccaaataataaaaatcacaaaacccaaaataatattcattaatggaccagcgatatttgtactaattttttgccaaattttagcattctgaaattgagtatcttcgggtgctattgataattcagtcccagtattatcaataattgtggcgtcatgatctacagaataagtgcactctttgctctcgtcaccattttcataaccctgaatggtcagttcttttaccaaatcagcctttgtaacttgcactggaatgccagaaattaaaatgtctgattctgaggcatctattctaacgactttacccttttcatccaaaaccaaaataacatttgtccctggatcaattgtactaatatcatcttttccagctaagcgaacatagccgcctaatggaagccagcgaatggtataactggtcttttttcttcttgtttggaataatttggggcccattccaatagaaaactcgcgcactaaaacaccactttttttagcaacaaaaaagtgtccaaattcatgcacaaatactaatagtccaaaaatgactagaaaaattaaaactgtagtcatacttatcccttaataaaaaatagagcaattacaggtaaaacaaataacatactgtcaaaacgatctaaaataccgccatgacctggcaatatttttcctgaatcttttactccgtaataacgtttataagcagattctactaaatctcccatttgaccaactattgataaaaaggcactagtccaaataagataagtgtaatctctcactaatggaactaaattaatataaattgcagaaaaaattattgcgcaaataacagcccctaaagaaccttcccaggttttattagggctaatcactggccataatttatgttttccgaactttttcccaatcatataagcgccaatatcagttgaccatactaccacaaatacatagcctagtagcgctaaacctaatagcgaaacatggtcaatatttcgaattgctgctaaataatgaaaaccggttccaatatatagcgaagctaatgtgtagaccccaacatcatcaaaactagttttgttcttagataatacagtccaagttaaaagtaacataactactgtaaagtaaataccaggtctagtaactccttttggaaagacattaaaaaatgtcttaggaacagtccacgtcaaagttgcaagcagtgccaataagaagtcaatcgataaaagaatttgtttcttcatcaaaaagacttcgctaattccaactgctgctaatgctgctgccaaccagtcaatccaataaccgcctgcaacaacaattggtataaataaaattaaggcaatcactgccgtaattgtacgttgtttcatatactctctctttataatttaccaaagcgacgatcacgcatttggaaatccataattacttttttcaaatcttcttcattaaagtcaggccaatatttatctgtaaaagctaattctgaatatgctaattgccataacaagaaattagaaattctctgttcacctgatgttcttaaaatcaaatcgggatcaggataaggtaaatcagctgtcaataattcctgattaactaattcatcgttaatatcttcaagatttatactctcgtttttaactttttcagcaatttttttgatagctgaagttatttctcttcttgatccataattaaaggcaaaatttaaaatcataccagtattatttttagtatccgccatagccttttttgttactgctaaagttttttctggtaattcatctaaaaatcccattatattaacttttacattattttccatcaatttaggcataaacttatcaaaaaaagtaattggcaacttcataagataactaacttcatctgttggtcgtccccaattttctgtagaaaaagcgtaaagtgtcaaaacctttacgcccattttatttgctgccaaggcaattttttcgatattttgcataccctgtttatgtcccattactctagggagatggcgtttttgagcccagcgaccattgccatccataataatggcaagatgatttaactctttttcttttgtcattgattagcccttagtaatttccttacgcttttcgtcagcaagttggtcgacacgcttagtagcatcatctgtaactttttgaacgtctttttctaaacgcttttgttcatcttcagtaatgtcgccatttttttcttgttttttcaagctatccatagcttcacgacgaacatttctaatagcaatcttagcttgttcagcttgcttaccaacttgtttggcaatttcttcacgacgttcaccggttagttgtggaatcactaagcgaattacattaccatcatttgcaggtgtaagtcctaggtcacttgctaaaagtgcatgctcaatattgtctaaactagatttatcatatggagttactaaaagaacgcgagcttctggaatagtcacactagacatttgagttaatggagtaggcacaccataataatcaacctttacgccttctaacaaacttgcattagctacacctgcacgaatatttcctaattctttttgataaacagcaatagacttattcatgttttcttttgctttagcaattacatcatttgtcattattttccacctctaattacagtaccaatattttcaccttcgataactttcttaatgttaccttcagtatttacattgaagacgattaatggaatatcagtatccattgataatgaacttgcagttctatccataactttcaagttctttgaaattacttctaattgagttaactcatcatattttgttgcactaggatcaattttcggatcagctgaatatacgccatcaacgccatttttagccatcaaaatcacatcagcatcgatttctgctgcacgtagagcagctgtagtatcagttgagaaataagggttaccagtaccaccaccaaaaattacaacacgacctttttctaagtgacgaactgctcttcttctaatgtatggttcagcaacttgtctcatttcaattgatgtttgaactctggtaggaactccgacatgttccaaaccatcttgtaaagctaaaccattcataatagttgcaagcattcccatgtaatctgcttgtgatctttccattcctagcttggcaccagtttcaccacgccacatattaccaccaccacagacaacaccgatttcaacacctaaatcatggattgatttaatttcttttgctaagtggctaataacgattggatcaatacctacaccttttggtccggctaaagcttcaccactaacttttaaaatgattcgtttatacttaacttgactcataataacctcctagtgttttgctcttaacattttaccatacttaagttgataatgttttgttgtttagcttatatatgaataattttaagcaaaaaaaagaagcactttgtgcttcttttttgaagattacttcatttgttcacgtacttcagcagcaaagtcttcttgcttcttttcgataccttcaccaacttcgaaacgttcgaagttaactacagtagcattttgtgacttagcgtaagcttcaacagtcatgtcagaatccttaacgtaaggttgatctactaagcaaatttcgcttaagtacttgtttacacgaccttcaacaattctaggaacgatgttagcaggcttgccttcattttcagtttccttagtgaatactgccttttgacgttctaattcgtcagcaggaacagaatccttatttaagtattctgggttaattgcagcaacgtgcatagcaatattcttagctgcttcttcgttaccaccctttaaggttactaatgcaacgatagcaccaccattgtgcttgtaagcaccaaatacttcatcatcgctcttgttgataagcttaaatcttctgaaagtaatcttttcaccgattacggctgtaaggttagtagttgcactttcaatagttccatcagctaatggagcatttaaagcttcttccatgttcttaggctttgcagctaatacagctttagtaatgtcgttaactaagttgatgaacttgtcgtttgatgcaacaaagtcagtttctgagttaacttcaacaagtgcagcagtattaccttcaaatgcaaattctgctaaaccttcagcagcaattctaccactcttcttagcagctttagcaacaccattttctcttaaaatgtcgattgctctttccatgtctccttcagcttcaactaaagccttcttggagtccatcataccagcaccggtacgttcacgtaattccttaacttgtgcagcagtaatttttgccattaataattcctcctaattggaactaaaagtaaaaattaatcttcgtcagcttcgttagctacttcttccattgacttttcgtcattagattctgcagccttgtcagccatttcttgttcaacgttttcatcgtcttcgccttgcttgccttcaattacagcgtcagccatagcaccggcaattaaacgaatagcacgaattgcgtcatcgttagctggaatgattacgtcaattggagtaggatcagtattagtgtcaaccatggcaacaactgggataccaagcttgtttgcttcgtgaaccgcaatcttttccttcttagggtcaacaacaaacattacatcaggaattctaggcatatcttcgataccgcctaagaatctttgtaatttgtccatttccttagtcaaaagtgcaacttccttctttggtaataagtcgaaagtaccatcttctgacatagctttcaattgcttcaaacgcttaacacgactttgaatagtagtccagttagttaaagtaccacctaaccaacgttggtttacgtagtattggcctgcacgagtagcttcttccttaatagcttcttgtgcttgcttcttagtacctacgaataagaatacaccatcattttgtgctacagccttaacgtagttgtaagcatcatctaacatcttgatagtcttttgtaagtcgatgatgtaaataccatttctttgagtaaagatgtatggcttcatctttggatcccatcttctagtttggtgaccaaagtgtacaccggcttcaagcaattgcttcattgttacaactgacataaaaaatcctcctatggtttaatacctctcaagggatcaactcgatacttgaccattcggcaccatatatcaatcgcccttgatgtgtgttttgttaattttatatgcacttacgcatacttaataagtttatcaaagctatatttaaatttcaactacaacattttaaaagattatattgtcacattatgatcttttaaaaattgttctttccaacttcttgagtgatgtttaaaccaatactctcgctttaaagcttgctgtttgtcattaaaacactcatgataaatcatttttactggtcgtctgcttttagtatatttagcacctttgccactattatgagcatttaagcgctgctgcaaatcagttgtaaaaccgccatatagggtattgtcgttacataataagacataaaaataataattcttctttacgtccgcctcttgagccaacaaatattgattaatttccggattataatgtccatcacttgtttgagttattattggactttttaaaatcaatccatcacttgctccatttttacttgcggtaataacaatgaggttactttctttttctgcactagaagagtatggttggatttttttgaccggtaaattatatttttgacaaaaatagcaaatttcgcctagccgttctggacgatggaccatcaccagtcgacctttattctttaatacttgactagcctgcaaaataatgtgctctaaatcaactaaaatctcatgtctagctatcgcctttttctcatttggattaacaacatgcccaggcgccaccttaaagtatggcggattaactaaaaccatattattttgtctaccaacaaatttaacggcatcatttacatcccctaaaaaaggttcaactctattttctaagtggttaagctcaattgacctttcgccttgatcatatgcatgttcttgaatttcaatagttttgaaatgtgcctcactgcgatgagctaaataaatactagcagcacaattcccagcacaaaattcaacaatttgatcccgatccttaatgtaatctaaacaaccagcagctaataaaattgtatccaaagaaaaactgaaggcttctttatcctgaattatttgaatttgatcactataaatatgatcaattttttcaccgtttttaagtttcatgatttgctttttgtccttttcatcttatttgatataataagtctacaatattggaggtaatttatgttttacaaaatcattcggccgatagcccgtcttatcgtctgggttttaaatggacacttgcacgttcacaataaggaaagattaccagaaggaacatatatcttagttgctcctcatcgtacatggtgggaaccaattttatttgcacttgcaactagtcctatgacatatatgtttatggcaaaaaaagaactgtttaaaaatccagttttatcttttattttacgtcatgctggtgctttccctgtagataggaaaaatcccggaccttctgccttaactattccggtcaaaggcttacgcaaaaatcacgattcattgatgattttcccttccggaactcgccattctgctgaattaaaaagtggagcatttgtgattgcaaaaatgtccggcaagccacttttaccagttgtttatcaaggtcctcttacctttaaagactttcttaagcgaaagccacttgaagttgtgattggtaatcctataacaattgagcgtaaatccaaaatcgataaagaaactacccctatcttgtataaacaattagaagatgcatgggcaaaacttgactacgaccaaaatccagattttaaatatatccccaaataaaaaagtgcctaatggcactttttttctatcctcgatcttgttgtaaacgatataaatcataataatatcctttttgattcaataattcttcatgattgcccatttcaacaattctacctttatcaagcacaataattttatctgcatctttaatcgttgaaagtcgatgagcaatagctaaagtagttcgtccttgccgcaattgcttcaagcccttttgaattagcgtttctgtttcagtatcaacattagctgtcgcttcgtctagaaccaatattttaggattagttaccaaagttctcgcaaatgatattagttgccgttgtccacttgagaattcacttccaccttcaattaccttgctatcatacttgtcaggtaattgctcaataaagccatcagcttgaacttgcttagctgcttgaataacagctttatcactaatttcttgattgtataagcgaatattacttttaatatccccataaaacataaacggctcttgtaatactaatcctaatttctttcgtaattcttcaggactaaagcttcgaatatcatgtccatcgagtaatatttctccagaatgaaattcataaaatcgcatcataatatttatgatagaacttttaccactaccggtatgaccaactattcctaaggtttgccctggctctaatgtaaaagaaatatcatgcaaaacatcatttttcccatcatacgaaaacgagacatgcttaaactcaatttttcctaattcaatcttagcttttggatcaaccttttgctgtggctccaattcatcttcatctaaaattttaaatatacgtttacccgccacaattccatcagtaaatgatgtcaaagaatccatcattgagctaattggattaaaaaagctctgaatgtagtttgagaaagcataaataacacctgcagctacaaaaacgcttcttgtaggaaaaccgaaataaattaaacttatggcaatcgcaacattatatagcaaactagtaagtggagaaaggagtaaagcattcatctttactaatttcattctcgtttttaattgagcatttgctatatcttcaaacttagtttgaattcttttttcttgacgaaattgttgaataacgttaatgccagtaattgtttcatttagtttggtattcattagactatttcgttcgcggtattctcgatataaacgagaattataataagaatatagccacataattagaagtagaaccggcaaaaaagctaaaataattaatccagcaatcttatctgtataatacatcgctacaaaagcagtaatcattgaaataattccaatcataacagctgaaaacatcgacaaaaatgtactcaaagtcattgtgtcatttgtaactctggataatattgaacctgcaggagtttcatcaaaataatgcattcccaattgatgtaacttttgatatagaactcgacgaactttttctaaagttttttcacctgctaaagaataataatattcataaaagaattgaagtaaggccttgcatattaaccccagaaggtaaatcgctgctacaccataaataatctgccatgttgcactcttatgagccaaaaagtgatctaaataatattgtaaaaatcttggcaaaagaatattaattacacttactaataaggctccaaataaagaagcaataaattctcttttatatagtaaaacaaacttaaaaatacgtttaaatatttgtttttgctctttaaaagtaatcgctttagaccaaatagattcatactccttattcaattccttcacctactttcttctcaagttcttgtctatcccacatttccttataccaaccattttctgctaataattgatcatgggtccctcgttcaataacttgaccatcttttaaaactaaaataagatctgctttcattacactgcttaagcgatgagcagcaataatagtagttttgtcttttcgacatttttgtaaattatttaaaatactcttttcagtctttgcatcaacagctgacaaggcatcatctaaaatcaaaatttgactatctttaatcagtgccctcgcaatcgctagtctctgcttttgaccaccagagagagaaaccccattttctccaactaaagtgtcatatttatttgggaaaagcatgatatcagtgtctaatgctgcttcttgagcagcttgtctaatttgatcaagtgaagcttctggctcagcgaaacgaatattatctgcaatcgaaactgaaaatagaaaattgtcttgagggacataagagatttcacccaaatacgaatccagagctatatctttgatattttttcctgctaactttatttgcccttgataattgtcaaaatctctcattagtaattcaattattgtcgatttaccagcaccaaccttaccaaccaatcccaaggtttgcccaggtttcaagttaaaattaattttctgtaaagctaatctattcttttcatctggatatttgaatttatcaatattcacttctagattgccagttattttatcaacagtatgatcaacttgatctttaattaaggatttttcactcagtaagctcataacccgcttataactcgcacttcctctttcaatcaagttgaacaagtagccaatagcaaacattggccactctaaactagcaatataagctacaaatgatacaagttgcccaatattaatttcattagtttggaccatttgaccacccacaataattgtaattatgtaagtaaagccaataattaaagttgttagtggatcatataacgaatcaatcttaaaaacccgcttattaatgcgaatggtatcatatgtcatcttatcaaaagccgcaatatcttcttgggcctgaccaaatgtcttcaaaaccttaattccagtaattgattcttgagtcttgttatttaactgactaaatgcttcttgactatgtcgatatgcttcatgaagttttgtacctaaaaaacgagccattaatgcaagaagaggcatcggaatcatagcaatcaaggtcaagcgccaatcaacaaaaatcatcatggcaatcaaagtcgttccaccagtaaatacggcatcaaccaaggctaaaactccatctccagctacaaattgaatagctgttatatcgttagttgcgtgagccattaaatcgcctgtccgatggcgctgatagaatgtccgatccatctttaaaaaatgccaatataattttgtagttaaatcacgagctaaaatttgcgctccaccccataattggcttcgccatcccaatcgaaacatatataagaaaagcgcagcaacaattattcctaaaacattaataaagaaatcaagccaacttatttttccctgattaagtaattcagccattctccctaaagctagtggtggtatcaaattagcaaaggaggttaaaattaaaaataaaatacccaaaaagtaacgttttttatattttttgaaaaaccagcttaattttatgaaaatatccataaattcctcctctttattttttaatcataataagaaaaaaagaagcagggaaaatcctgcttccaataatcaattaagctttacaaatattaattcttttgttgatgcttcatcatgttcatcacttggttaaccttcttagcagatggtttttgtcccatttgtgacatcatagcaacaatcatatcttgattaattggtggattttcttggaaatactttttcatgtatgcacgtgctccataaaagcctccaactaggccgattaataaagcagcgatgattaaaataattgctaaacctaaattcattcttttttacctccgtattagtcttttcttaagcctttgcggcgttgtgcgcgtttcgccttttctgaagtgatttccttgccatttttgtcaattaaaactagattttcaatttgttgtttgaacccagctctaaaattagcaataaactttttatgtagctcttctctctccgcctgttcttcaggggtcaagccttcagtttgctttttatgataaagttcgttaattcgattacgaacacgttcttcttcttttttatccataggttattcacctcacaacaatattaagtttaccttattataggcaataaaaaaaggctttttttcaggaacaagtgtttgcttaaacagaccgaatctgctataataagggttaagaacagatacggagacaaaattatgacattaaaagaagattcaaaccaattcaagattcttgaatttatttatgacacagttgaagatcgaggatttccaccaactgtacgtgaaatttgtgaagcagtcaatttatcttccacttctacagttcatggccatctcaatcgcctagtaaaaactggctatttatacaaagatccaagtaagcctcgtgctcttgaaattactcaagaaggtttaaatgccttgggagtcgatcctggtattccatatcttggaactgttgctgcaggtgatcctgatacagccttagcagatgatagtggtgcagaatattatgtagaacgtcctgaacgttttgacaagcgtgatccattatacatgttgcgggttgatggtatgagtatgattgaacgcggaatctatccagatgacttagtaattgtccgtcatcaaaatgttgctgcacaaggtgatttagtaatagcttatactgaaaataacggcactaccttaaaagaattagttcgtgaccataaatctaagcgtttgcgcttaaaggcttacaataaggaaatgtatcctgatgaacttttaccagatactaattttaagatttgtggtaaagttgtcgcattaaacagagattattaaaaataaaagaatggctgctttgagctgccattctttttcttaacaacaaaaaagatgaaacctagattttatactagatttcatcttttttactttattattaacttttagtgagctgtaacagcgactaaattatctcccgctttaacttcatcgttttgaactctgtcaacagaagcataatcattggtgttagttacaataaccattacagttgtatcataacctgcttctttgacagcagctaaatcaactgtgccaagcttgtcacctttctttactctttggccttgttttacaaagctttcaaagtgttcgccctttaagttaactgtatcgataccaatgtgaattaaaatttcagcaccgtcatctgatttaagtccataagcatgcttagtttcataagcaacagtaacttccccatcaactggtgagtaaatattaccatcagctggaataactgctgcaccatcacccattaacttggctgagaaaacttggtcatgaacactagtcaagcttacttctttgccgtttacaggactagcaataacctcatcacttaatgaaagttgctttttaacattttgttcaacttcagtttgcttttcagttgattgaattgcagaaactgttgacatattaactgcttcttcttttaagttctttttaccgtacataaatgttaatgcaaatgcaactgcaaaactaagaagttcacacattacgtaaaatggaattgaacttgggtaaattgacaagaagccaatgaaacctgctgcacccattgatgctgcgataaccttagttaaacctgcaaccattgctgcaacacctgaaccaattaatgcacagaagaatgggaatttgtacttaaggtttaccccaaataatgcaggttcagtaatacctaagaatgctgaaacacttgctgatgaagccaaacctttcatcttcttattcttagttaagaagtaaattgcaagagtagcagcaccttgagctacgttagccattgatgctacaacgaaaatgaagtcacctgaaccgacatgattcttagcaaattctgttacaagttgagtttcaattgctgggaagctttggtgaagaccggtagtaacaattgctgaataagtcaaaccaaagacacccataccaataaagctagtagtgttgtataaccaaacaataccttgagttaataagtctgatacttctttgaaaacaggtccaataacagtaaatgttaagaatccagtgatcattacagaaagaagtggagtaaaggtaaagtcaactgcttgtggtaagatcttgtggaatctcttttcaagaattgataatacccaaattgctactaatacaggaacaacttggtacttgtagttagtttgcattacgtggtaaccaaggatattccagtactttgcagtagcacctaaatcaggagatgtcataatcatcccaattgcggcaccaaggaattggttagcaccaaatctcttagaagcagaaatagcaactaaaattggtaagaagataaatggtgctgcagacattaattgaataatatctgaaaatcctttaacagcagtgttcatttggataattgacttaggtccaaacaaaccaggttgtgttaagaagttattcaaagccattaacaaaccacctgctactaaagcaggaataattggtacgaaaatgtctgacaataacttaataaatgccataactgggttaaatggtttgccattatctgcaattttcttcaattcttcagtggaagcttcttgcacgccagttaattttactaattcatcataaacaaagtttacatcccctggtccaataataatttgatattggccattagtcttaaatgtacctttaacgtctgcattgttatcaagtgctgcttgatcaattgcatcaaaatcttttaaaactagtcttaaacgggtcgcacagtgtgctgctgctactagattgtctttaccaactgcagcaacaacttcagaagcaaccttcttgtaatccattgccatgtttacacgtcctcgtttctaaaaaataaatatttgaaagcccttacagatactatgatactttagattattttttatgtcaatcgtttaacataaattttatcattgaaaaatgtaaaagctttccgaaaaggcttacattattgataaattagcatttattaattgctaagcgcttgacatttgctggggatagtaatgtaaaataagggtataaattagataaacaaggagaataattatggagtggtcaactgagaaacgttacttaccttatgaaaagtggtcagctaagactttacttaaattacaaacacaagcaggtaactcaccttatcaattacattatcatatacgaccaaaaagtggattattgaatgacccaaatggattttcttactttaataatgaatggcatgttttttatcagtcatatccttttgggcccgttcacggcttaaaatcttgggatcactgtgtatcacaggatttagttcattggaatgatttaggaacagctatctacccagatacagacttagatagtcatggcgcatactctggttcagcaaaagttattgatgacaagttattcttaatgtacacaggtaatgcccgagacgctgaatggattagacaccctcaccaaatgggcgcttttatggataaaagtaataatattgaaaaactgccaacttcattaattgagcaaccacaacacactacagatcatttccgtgatccgcaaattcttgaacatggtggtaaatattactgtattttaggtgcccaagataaggcaactaaaactggaaaaatcgcactttttgaagcagacgatgttaaaggtccttggcatgatctaggatatgtcgactttactactgaagaaatgggctacatgattgaatgccctaacctggtttttattgatgaaaagccagttttaatcttttgcccacaaggactagataaatcaatagtcaaatatgaaaacatttatccaaatatggttttagttggtgataagtttgactttaaatctgcccaatttgatagtaaaaattctataaaaaatttagatgatggttttgatgtttatgcaactcagccttttaatgctcctgatggtaaagtttatgctttgagctgggttggattacctgatttaacttatccaactgatattgaaaattggtcaggatgttacagccaagtaaaggaattaagcctcaaggatggccagctaattcaaaaacctgtatctgctatcaaagatttgcgccaagaagaagtgcctttcactggaaaattagaaactaaaaatcaatatgaacttaagctcaaagttgcagaaaaccaaaaaagcactttacatattgctgcaaacgaagaaaatggcgagagtttgaaattacacattgatacagcaaaaggcgaactaattcttgatcgtgaaaatagtggctttacagtaaatgaaaaatatggaacaaagagagcaattaaactattagaaaactcagcgttagacttagatatttttgtagatcactcactaattgaaatattcattaatggcggtgagcacgtattaactgcacgtttcttccctaaagaaggaagtaataagctcttaatagacaaaaatatcaaatttaaaggccaatactgggaaatggcagatatctaatgtctgttaaattaactgatgttgctaagctagctcaagtatcaccaactacggtttcaagagttattaataattatggctatattagcgaaaaaactcgaaaaaaagttttttcagcaatgaagcaattaaactaccaaccaaattccctagcccgctctctacaagggaaaaaaactcgcctaatcggtgcaattgttcctagtttaactaatccattttttgctgaattagttagtcggattgaagaattgcttaatcgaaaagattataaactaatactttgtaatgctgtccaagattccagccataaagaacgagaataccttaatatgttaaaagctaatcaagtggatggaattatatctggcactcataatttagatattactgaatatcaagaaacaggcctgccaattgtttcatttgaccgtaatctcggtccagatgtaccagttgtcagttccgataactatcaaggtggttgggttgctactaagagtttaatcaattctggctgtaaaaaaatagccttcttcggtaatatcaagggttctaacaatccaactgatttacgtcttaaaggctatcaagatgctattaacgaatatggcctaaaagagattttagtgccaatgaatttctatgaatctgctaacttaaaaaagatggcatttcaaaaattactcagccaacaaaaaatcgacggtgccttttttactgatgatttttcagctaacttattctggcaatatagtcgttttaatcatttcaaggattgtgaaaatatcaaagtcataggttatgatggtacttcaattatgcggcagcttaatccagatctttcaacaattgcccagccaatagaagaaattgccaacttattagtagatcttttaataaaaagaataaatcatgaagaactttctgattcaaattatgttttaccaattactttaataaaaggtaattcactatagtaagaagtacaaataaaattttcaataacaaaaaagacagctctttcgagctgccttttttaacgtgagattaacgacgaacttcacgaattcttgctgccttaccgtgtaagttacgtaagtagtaaagcttagcacgacgtacacgaccatgacgtacaacttctaccttagcaacacgtgggtcgttaactgggaaagtacgttcaacgccgatacctgaagaaatcttacgaacagtgtaagttgcgctgatgccaacgcccttcttcttaattacaacaccttcgaaaagttggatacgttcgtgagtaccttcaacaacacgtacgtgaacacgaacagtgtcacctgcgcggaatgctgggatatcatcacgaagttgttccttagtcaattcttgaattaatggatccataatatatcttctccttctacgatattcttcaacaatactcttgccagcggaatacccataacttaattacgtggatacaaacaccactcagaatagtttaacaagtctagtttttattttcaagttctaacttaatttcagttaataatttgctttcttctggtgtaaattctcgattttctaataaatctggtcgccttaaaagagtatttcgtaatgcttcctttaaacgccattcagcaattttcccatgatttccactcattaatacttctggtactttcattccttcaaattcggcaggacgagtatactgtggatattcaagcaatccatgagaaaagctctcttcaactgcagatgcagaatttcccaagactccaggcaaaaggcggacagttgcatcaatcatactcatagttggtaattcgccaccagttaaaacataatcaccaattgagacaacttcatcagccatctcatagactctttgatcaaagccttcataatgtccacaaataaatgtcaaatcttgctcttcatccgcccaacgtttagccatcttttgattaaaagttttcccttgtggagcagtaataataacttttccctttttttcaagcgaatcaagggctttttttattggcataatttgcaaaaccatcccagcgccaccaccatacggtgtatcgtcaacatggtgatgaacatcagttgtaaaatcacggaaatttactaaatttaaatcccattttttatcttcaagagcacggccaagcatagagacctgtaatggagtaaacatatctgggaaaagcgtcaatacattaatcttcatcgcgtaatccctccatcaattctactcttacctctcctttgtccaaattaacactctttacaaaacttgaaacatatggaagccaaaatggtttacccactttaggagttacttgccaaatatcattagcacctggggcttcaatatcagttactttaccaatcaattcgtcggtttcattatctactaccgataaaccaataatctggtgataataataatgaccttcaggtaactgatcttggtcttcttcactaattaccaaagttttaccaaataaactttcagcttcattaatatctttaatttctttaaaagtaaccagccaaaattgcttaaatggtcgtccactttctacggttaattgacgcatatcatcttttataaaaagcttaaccccttcgcaaaagcgttgctcaggaaaatcagtaattacctttacctttacttcacctttaagtccatgacttgttaaaacttgggcaacatcataaaactgcattaaaaaatcctcattctagctaataaaaaaagtttgaagctttcacttcaaactttctaagtaaatctaattacttgttgtattttgcgtcgtgcaacttttgcatcaagccagcacctgaaagaagtgatctaacagtgtctgatggttgtgcacccttttgaagccatgcgaaaactttttcttcgtcaagctttaattccttaggttgtgaaactgggttgtagtaacctacttcttcaataaaacgaccatcacgtggagctcttgagtcagcaactacgatacggtagaaaggctttctcttagaacccatacgacgcatacgaattttaactgccataatttgaattcctcctaattaattaacgatatataatataccaaacaaaatacgaggtgtaaagcatttttccttaacagctttattttttatgatttaaatcgtttaatgtgtttaaggcgcttcttcttgcccttcttgaattgcttacccatacggcgcattgcagcttgagccattggtgaatccattcctggaagtcctgccaaagccttggtattaccactagtaatcttttgcatcatttcttttgattgcttaaattgcttaatcatacggttaacttccataattggacgaccagaacctgctgcaattctgcgtcttcttgatggattaagcaaatcaggatcctggcgttctgcttcagtcattgagtaaacaatggcctttgtgtgtgcaatttgcttttcatcaatagaaaaattctttaattgcggattattagccatccctggtaacatcttcataatttgatcaagtggccccatcttttgaacttgctctaattgatcaatgaaatcgttaaagtcaaaggtgttttcccgcatcttttgggcaactttttcagcttctttagcatcataatctctttgggccttttcaattaaggttaaaacatcccccatacccaaaattcttgatgccattctatctgggtaaaatccttcaagttcagataatttttcaccttgaccagtaaagagaattggtttgccagtaaccgctctaattgaaagtgcagcaccaccacgagtatcaccatcgagcttagttaaaataaccccagtaacatcaaggcgcttgtcaaaagtttctgcaacttgtgcaccaacttgaccagtcattgcatcaacaactaagacgatattatcaggcttggcaactgccttaacacgctctaattcttccattaaagcttcatcaatttcaagtcgaccagcggtatcgatcaaaacataatcattcttagcttcttttgcttgagctaaaccatctgccacaatcttagcaacatctttttcatcttcgctaaagacagggacagataattgatcaccaatttgctttaactgatcaattgcagctggacgataaatatcaccagcaattaataaaggccgcgctttttcagtatccattaaatacttggccaatttaccaacggtcgtggttttaccagtaccttgtaaaccaaccatcatgataattgtaggaatatggggagccttatttaacttagcagcttcttcccccatcatcttagttaattcgtcattaacaatcttgataatctgttgaccgggagttaaactaccttgaacttcttggcctagagctctttccttaatctttttaatgaagtctttgacaactttaaaattaacgtcagcttcaagtaaggcaaggcgaatttcacgacttgcggcgttaatgtcagcttcactaaccttacccttaccggttaaattttttaatgctttttgaattcgttcacttaaattttcaaaagccatctaattattctcctctaattaattttattaacttagttaagttatcgcggcttgcttcaggatcactagctagctgctttaaagccacactagctaattgatccatttgcaagtagtcacgcttaaggtgaagctttttttcatagttttccaagcttttacttgatctacgtaagttatcataaacagcttgccgagaaacaccatgattatcagcaatttcacctaatgataaatcatcataataataatcttcaaaataggcctgttgccctttcgttaatagttggccgtaaaatgaatataagtcagccaactcttcgttttttatcagttccatttacttcaccaatttatagtataccaaaacaaaaagctacactccatggtgtagcttaattcataatgacttacttaataaagaaatataatcctgaaaataggataatatcccaaagcatttgtagatatactagatacattttctttttagctgcttgacctaataaatagtagctagggataattgagaaaagcacaaacaaaattgctatagtcaagttgacttgtgaaactcgcaatatcaaaagagcaagtaaaagcatgttgactaaatgaccaatttgatattgattaattttcataatcttccctacttcccctttagtaaggccttgtatctcctacttaaattatactaaactttcactaagaaagctttcaaattgattatcataaagaaaatccatgaataaatataatgctaaaataaaagtagttaataaatggaagaagaaactgatatggataaagatattaagctaattggtggccatttatctcttgaccaattaaatgcaatttttaggaaaattccccaagaattcgatgttttagacgaaaatgatatcgtcgtctggtcttcaatgaatacaaacagaatttttccaaggaccgaagcagatattggaaaatctgtttttgaaatacatcctggtcattcacaaaaagctgttaaagccgtgcttaagcaaatgcacaatggcaaaagaaagtctctttcaatcaatatcaccaaaaataaaatgccaattaacatttctttttatagcttacataacgaagcaggaaaatatattggctgcgttgaagttacccaagctgtaaaagattatcaagttaaagggagcaagtggcataatttgattcagctattttttcatagataattttttacaattgaattatcacgtgcaacatttgcgcaacaaaattacaattaatagcatttttacaaaaacaaaaaaggcgtaagatcaagctttcaagcttgtctacgccttctattaattataggtttttatccatgttgaaggttaacttactcatattaatactttcagttaacatcttgccccataacttttcagtttgttcacgagtataacgaacagtttcttgattttctttagtcaagaattctgttagttcttcacccttcaaatcgccagccttagcaacaacttcttcaattcttgctctaaagtaacgacgcatttcaattagataatcagtatcaaattgaacaaattgtgggtagtgactttcaacagttgccgctactgccttgtagaaccaccaggcatctttttgattgaaagttaagctagtattcttaaaactttcttcagtatcattcatattggcaaagaatggaataaatggtgtaaaggttgggccaccaatacataaccagtaaatagccgccttatcttctggcaagtcatttctaatttgcaagatgtgagcattttgagttctgtttaaaccaattggacggtagcgatgcttttcttcatcagtacccttgccatatggatcaaatggagtttcttgatagtgactacctaaaacaaaagtaatatcatcaggattaattaatttttctgctttacggataaatggtaaatcaccatcttctggatcttgttcaatacttggattgaagtatctttgagcataccaaacacgactagtgttgtagtgacgatctttttcattgtaagtaccaaaaatgtgacggaagttaaaaccttctcgatcaacattcaagtggtgcttttcaacgaattcttggattccttcactccacataaagttatcagaatcattaaagtcaacttgttcaattgaaactcggtttgcagcaactgcataacaatcatcgggaattctttgagctacccagtggtgaccagtaacaatttccatgtaccaaacttcatccttgtcaccaaacaaaactgagtttccagcagcagaaccatacttcttaatcaattcacccaataacttaacaccatcgcgagctgaatcaatgtaaggagcaactacattttgcatacaatcttcgtcaagaccatcaactaccaatggatcaaaagctaaagttctttcgttaccataagttgattcagtacatgacattgcaacattcttttcgttaatgccactttcttcatagtaacccaagttcttgtagtctacatttggcacagcttgagttctgtaagcccaatctggtaaatccatttcgaacttgttaagccaagacttaatatgacgccctttttcacccttaacagcaggctttaccacaaatttttgtggagtaattggtaaaaaggtatcatcatttctagcaatcatagttgaaccatcaattgatgcttttttaccaactaaaatagttgtacatgcgcttaattctttcatttttttctccttatacaatgccgtgaaataaaccaacagcataactagctgcatcaaaatcagccaaatcttcagctttttcaccaagaccaactaacttaacaggtaatttcatttcatttctgattgctaaaattaccccaccctttgatgagccatctagcttagttaaaacaagtccagtaagcttggttgtcttgtcaaagtctttggcttgaagtaatgcattttgtccagttgaaccatctaatactaataaggtttcgcaaggttgatctggaactaactttttaattgtccgctcaattttttcaagttctttcatcaagttttgtttattttgaagccggccagcagtatcaactaaaacataatcagcatcctcttctaagccatgtttgacaccatcataaactacacttgctggatcagcttgaacagggcctgttacaacttcagtttcagtccgtttgccccattctttaagttgttcaacagcaccagctctaaaggtatcagctgcaactaacacaacctttttgccttcttgcttgaatctttgagctaacttaccaatggttgttgttttaccagcgccattaactccaacgaaaagataaacattagtctttccttcgttataagttaatttttcagcgtctgcatccccattttgatcataaatttcaacaagtttttgaacaattaattttttgagttcatcgtgactcttcgcattttgtaatttagcttcgtcttttagttgatcaattaattcttcactagtttcaaagccaacatcagattcaattagcaaatcttctaattcatcaaagaaattttcatcaacacttctaaattgggcaaagaaggcattaagcctagcaccaaagccttgatttgttttctttaagccattgtcataaagttcttgcttcttactttcgctagattctgtttcaggttctatttcttcgcctttttcttcttctgggctactatcttcaacttcttgactagcagcagtatctactggttcagattctggctttgattcagcaacctcttcaagactagtttgagcttctttactagaacttacttcaggttcgttttttacctcttcagaagctgaactttcattttcagcttcagcagacttagcatcagtctcaacttctgccactttattttcttctagttttacttcattagtttcttcagcaacttccgccttttcctcttctggcttagaaggagcctgcttagctttttcctcattatttccaaataatgtctttttaattttgtcaaataatcccattaactcacctcatcattatctttaatttcttttaatgatacagaaagaacttgcgatactcctgactcttgcataactacaccatacagctgatcagctttttccatcgttccgcgtcggtgggtaatcacaataaattgtgtatgcatatcataatgatgtaaaaacttggcaaatcttgttacatttgcatcatcaagagcagcctcaacttcatcaaggatacaaaatggtactggatttacttgtaaaattgcaaaaagtaaagtaattgccgttaaagctctttccccaccagacagtaaacttaatttttgaagttttttaccaggtggttgcgcaataatttcaatcccagtttctaataagttatcactgtcggttaaaactaacttagcatttcctccgccaaagacaactgggaagatttgactaaagcttttagcaatttctttaaaggcttgactaaaacgctttttaacttcttcatcaaggttagacattgatttttcaatatcttctttagccttaagtaagtcatcttgctggcctgtcaagaaatcataacggctcttaacttcttcatattcttcgattgaagacaagttaactggtccaatatcatctaaactcatttgatgtaacttaacacttttagcaagtttagcttgattttctggtgtattctcaatttcagcttgattcaaagccatttcataagttaaagcatattcatcacgtaatttatcaagatgctgcttcatcttcgtcttaacttgagccagatccacagaatagctctcctgctcagttgctgcatcttttctcaagtcataattacgggtaaagctagcatctaattgactaatttgagcatctagttggcctaagtgactactgattttctttaatttagcttcaagttcttgcttttcatgagttaattcagtgattttttgagctttttttgttttttgttcagcagttaattctttattagaagtcaaatcaactaacttgctttctaaaagttttacttgtgaagcacttgtttccttttgagttgataaatcagctaacttagcctttaaattagtcttttgattgtgaagtaccgctaatttaggattaatttcagcaagcttagcctgaacatctttatttaaattatcaaaatcatcaatttgtgccttcttttcagccattgcttgcttttgcttatctaaacgctcactgatttgagtttgagcttgctttttctcttcaattttttcttctaaatgtttaatttcagctgctcgctcgtcagcgcgattttgatagatatgttgagcctctttaaggcgcttaacttcactttctttattttgatagcttacagccaaggcacttaagtcttgaatagcaacttgtaattcatcatttaaacttgcaaaaagtttttgttctttggaaagcttttcatctaaagaaaggatttgttctttagcagtttttacttcagcaatcaactcagcaaccactttagttaatttattaatctcaccagcagtctgaagtggggaattatttctctgattctttgccccacctgacattgaaccgcctggactaataacatccccatctaaagtaacaattcgataacgataaacccgagcattaatcttcatggcattatcaattgtgtcggctacaataacattgcctaacaaataattaactgcagctgatatatcaacctggcctttagttttaactagttcactagcaactccaataaaaccaggcattgacttcaaagtagtaacagttgatgaaggaattgtagaaaagcgcaggccatctaatggaaggaatgtagctctacccattcggctttgcttaagctgcataatggcatttctagctgattgcttagtatcagtaactaaatcctgaacaccgccacctaacgcagttgttaaagcagcttctaactcagctgggaaatcaagtaattcacccactgccccaataacaccttgatattgatctagatgatttaaaatatttctaacaccataataatatccttcatgtcgtttttgaatattttctaaggcctctttctgagctttagctgcttgatatttctgacttatctcctgtaaagagcgattagctaagttttgtttggcagttaaatcactaattagaacattcttagtttgaacttgttcttgtaagttactttttttagcactagcatcttgaccttgcttttttaactgagctaattcagcttcagctttttccagttctgcttcggccgtctttaattctggaattgtagaattactgagtcgctttaactcattttctgcataaactaaatcgttattattacttgtttggtcttgcaaactttgaatataatcattacgcaagttttctaattctttactcaaagtttcaggatcagaatgaagactttttgcgtaactatcacgcttttcagttaaagcagtttcttgagagatagcttgctctacttccttttgcaaaccaacttctttttcgcttaaaaccgcaagattcttctttagttcatttaactgattctcatattcatgcttggtcgcattattatattgatctgattgttctgcaacttgtaaatcagtatttaaattagaaatctcctgagttaaagaaagcaatctctcttgtaatgcttctttttctttggttgttttggctaattgatttttcttctgagccaaatcattttgcgattgactaacttcttcatcaagcttattaagcagaatttgactcttttcagcttttttagccaattcagttcgcttaagctctaaatcttgtaattcaaaagcaagcagcgtctttaagtctttatctaacccagatttttgaaatttatattctttagctagactactttgcttgtgtaaaggttctactcgcccttcaagttcattaactaagtcattaattctaattaaattatctgtagttttggctagttgattagttgctgcttgcttttgctctttaaaacgtaaaactccagcagcttcttcaaagatagctcgacgattttctggtctagaatttaaaatttcatcaacttttccttgggaaataattgctaatgaatcttgagaaattccagagtccataaacaaagcatgaacatcttttaagcgaacagtttggttattaattaagtattcgctatcaccattacgtaagattctccgggcaaccgttacacgatctgcatcaaagttaagagcacgattcttattatcaaatacaagctcgacttcagcatgattcattggcgtcctatactggctacccgcaaaaattacgtctttcatgttactaccacgcaaagacttagcgcttgactcacccattacccagcgaattgcttcagtaatgttactcttcccactaccgtttggaccaacgatgccagtgatgccatcgccaaatttgatttttgttttttctgcaaaagatttaaaccctgttagggtaagttcagttaatggcaccttttcaccttatttctcttgatattttattaatgctagtttagctgcaacttgttcagcagcctttttattgtggccactaccttcagaaattttctttccttcaacaagtaatgccactttaaaattagaaggtagttttgattcttcaagaacttgatactcaatcttaattgcaccattgacttgtaaaagttcttgcaaatctgtcttataatctcttgaatcagtaaattcaccgctatcaatcaatggataaacagttaattttaagaatttttgaacggcatccattccctgatccaaaaataatgcaccattaaaggcttcaaaaacgtcttctagtaatgtctttcgctctctagcacctgttttttcttcaccatgacctaaatttatctcggctggaaatccacattcaatcgcaaaacctgaaaagccttctgtccgaacaatattagaacgtaaacgcgttagttgcccctcattcaaactaggaaaatgccggtaaagataatcagatactgctagttcaaggacagcatctcctaaaaattctaatttttcataattacctactgactctttaggatgttcatttacatatgaagaatgtgtaaaagcttcctcaagaagtgtttcatttttaaacttaattccatattcttcaaataagtaatttttaaattttgtacttaccatttcaaaatcctttctaaaggtttattatacctatttttcagtacgcaaaaaaggaccgagatggtccttttttaaatattaaatttattttttatatgcaacatagtaccagttagggaagccattaccattactcttagatggctgtaagctataaccagttaatttatcattaatcgccataattgaatatgaattagtaagtggtactacataagcttgatcattcatatattgttgccactcatggaatttcttcacacgatatttatgattgaaggctttttgtgagtccatttcactaagcaattcattatttttcttagttacaaatctgctgtagttaaattgggctgtttcactgtataaatcatttggtgaaggttcacttgataaactccaagctccgataaacatatcaacattaggagcatcattttttaacttatcgtagaatgaattaaattcaattaagcgtccaccagttaaaacaacatgtaagcccatcttcttccattgctgaatgtaattttgaataactgcatcttgaatagaagaaccactcattgctgctaagcgaatagttaaaggtttaccatttggttgaactcgataagtaccatgctttttgtatccagccttatcaagtaattcttcaccctttttaaggttgaatgaatagcccttagcgtctttatcaaaataatctccaaattgttttggaatcaaagttggaattctaaaagttaatccagatgaataacgcttataaacttggttaacgttcatgccataagcaattgcttgacgcaaagccttattgttcaacttagcgtttttatctattacattcttgccaagagttgaattgtatttaccaactttaaatccaagataagtatattgaagtggaactttagcaatgaagttaacatttttagttgaattaatattttgccattgagaattaattacttgagttacatcaaacttatttgatttaatagattgagaaacagaatttggtgaaacaactgaagctgtaatttgacttaattttggagtaccacgccagtaatacttgttaggaacccaagtaactgattgtccacgaacaattttagctaatttgtaaggaccgaagaataatggcttctttctaattttatccgatgaagtcaacttcttgaaacttacatctttcaaatagtgataaggttcagcgttttcccaaatatagccattgccggattgagtcataccaggtttcatttcattaaaatgaataactactgtcttaccattttcaccatcaggcatttcaatacctgaaatagttgatgctttgccttcatgataatccttcatcccaacaatatcttctaagcttgaagtataattttgagattgtgcatccttatttgcaagcatctcatatgcaaattcaatatcctttgcaacaactggttggccatcagaccatttaacattattttttaatttaattgtagctgttttagcattttgatcaatttttatacttgcagcaccatcatttgtatagcgatattcatcatcagttgcaaataaactctctccaccatattgcattacttcactatcaattgcactagtagataattcattactaaaaatcccggtaaatggagtatctgtttcaattgcaacatttacttttccgccctttttagctgttttagtcggaactgcttgcttaaaatttgtcgcttgtttagtagcatttgaattattgttattgctaccacatgcagtggcggtaagggctactgccgataataaacctaaacctgtaaatacctttaaatttttcatattattctcctcatcatcatccaatgacagtaactattttaacaccaaattttaatgaaaaaaagcatagttatttttatttaaatttatttttatttaaactaaagaataaaaaatgagaaaacaaaaaagattcctttcaggaatctttttcgaggtattattcggttatatcggtttattttttactttgtgtaagcaacatttgcccaaacactgttagcctttgatggcttcaatgagtaacctgttaacttactatttactgcagtgatttcgtaaccatttgatacaggaacaacatatgcttcatcattcatgtacttttgccattcgtggaatttcttcactcggtaactgttattaaatgctttttgtgaatcaatttcatttaacaattgagtattcttcttagttacaaatctcgcaaagttaaatggtgcttgttcactgtacaagtcagctggagatggttcactagaaagtgaccaaccagccataaacatatcgatattaggcgaatcgttttgaaccttgtcatagaatgaatttgattccattaaacgaccagatgaaagcttaacatctaaaccaatctttttccattgttggatatagttttgtgtaattgaatcacttactgagctaccacttctagcagcaagataaattactaacttcttaccatttggttgaacacgatatttacccttcttcttgtatccagctttatctaagatttgttcagctttcttcaaattgtatgaatatgcatcagcattcttattgaagtatttaccaaattgttctggaattaaagtaggtactctaaatgcaagaccgttgaagtaacgcttgtaagcttcgccaagcttcattgcatatgcaatagcttggcgaagagccttattattcatcttagaattcttattcattacattcttgccagtcttagaatcatatttacctactttaaatcctaagtaactgtatgaaagaggtactcgagcaataaagttaacacccttagtattcttcacattattccattgtgagttaataacttgagcaacatcaaatttcttactcttaattgattgagttactgagttagtaccaacaactgtagcaacaatcttcttaagctttggagtgccacgccagtagtacttatttggaacccaagtagttgattgaccccgcacgatgctttgtaatttatatggcccaaagaagagtgggttctttctaaccttgtcgctagattctaagtctttaaaggcaacatctttcaagtagtggtaaggtactgctgcttcccagaagtatccgttacctgattgcgtcatgcctggcttcatttccttgaagtgtagaacaactttacgtccattttcaccatctggcatttcaatacctgaaattgttgaagacttaccttcatgatattcttcaagaccgacaatatcagctaaagatgaagtataccgttgagacttggtatccttgttagcaatgatttcatatgcatactcgatatctttagcagttacttgcttaccgtctgaccatttaacgccttttttaacttcaatagtcacagttttagcttttctgtcaagcttaaaggtagctggacctttattagtgatcttataactatcatcagtatcaaacagtgcttcattaccaaattgcattacatcactatcagttgaagtagtttctaattcattactaaaaattcctgtaaatgggaaatcagtttcgattgcgtaatttaaagtaccaccactcttagctgttttagttggaacttcgtttttaaacttagaaactgaatttgcagaattagaacttgaatttgaattactaccacatgcggttaaagtaagagcaacccctgtaagtaatccgattgagcttaacacctttactttgctcatatgacattccctccatttgtttgtcggttcatatccgatttgatgtttttaatattagcatggttattttaatattgcaacatttttatctcattttatttttaatgtttaatttataaagcaaatattcacctattacattctttaatatcagcaatgtaaccacttactaaaattctaacaaaaattatatttttttactattaatttgcattaagccttaaaaatcgcaacttattttatgaaaagcaagataaaaattaaagttaaattcgcaattatgattttttattacaaaataaaaaggaatcttacgattcctttttaataaaattaacttaattttcacgctgacgagcatccccggctctttgtaaagcacgaccaacatagttaatgctcaaagaaataattaaaagcaaaattgtagctggcacccataaccaaggtctagttgttacattaactggatcatttgcatacccaattaatgtacctaaagaaggagtggtagttggtaatccgtaaccaatgaatgaaagtcctgtttcaatcccaatattaccggcaaccattaaaataacatcaataataatcattgaactgatatttggcaatacttcacggaacatgatttgtaaattcgaagaacccgatgtttttgaagcaagaacgtattcacgatctctttgagataaaacaaatgatctatagtatctagttgatgaagtccaaccaaataatgaaatcattaaaaccaatgtaacagcattatagtttggaatagttgctgcaaaaacaatcaagattggcatctgtggcaaaatttggataaagtcaactattctcataatgatattatcaatagtaccaccaaaataacctgaaattaaaccaataactaatccaaccacttcaataataagggtaacagatagccctatcataattgaattacggccacccatcatcaataattgcaggatatctctcccaccatcatcagtaccaaagatgtgacctgcttcaccccagctataatatgcatcagcaatattaacttctgtaacttgtgatttatttaaaaatagtgatcctacgaaagtaaataacaagactgcaatgataataatcaaagcacccattgccactttatctttctttatttcacgccaaacaactttaaatcctgaaggaggtaaagaaactttagctgcagttttttctttctttgttgatttatctttagccatatttctactccctcctattgaattctaattcttggatcaacaatactcataataatgtcagaaagcaaattcccaactagggtcaagataccatagagcaaaattagagctgtcaatgtcgtgtaatcacgttgactaattgaatcaaggaacaacttacccataccaggatatgagaacactgtttccaaaataattgatccactaagcaaactagtaattgtattaccaaagaatgcaacaatcggcaaaagtgagttccgtaaaatatgcttgttgaaaacaactttttcagggacaccctttgaacgagctgttcttacataatcttcaactttattgtcaacaatacccgttctaaggtattgaacaatacttgtagtactgatcaaggcaactaaagtacctggtagaatcaagtgataaattcgactcaaaaagactccgaaagcaccatttgcatctgatccaactgatccactaattgggaaccaatttaaaacgaaaccaaatagatacaatccaagcaagtagaacacaaagcccggtattgcaaaagtaaagtagttaaagatttgaatactttggtcttgccacttatcttggttacgtcctgcactaatccctaaaggaatagcaatcaaataagttaaaattacagtaaacaaggatagccaaaaagtattaattgcccgatcccaaataagtgatgcaactggaacgtgttggatgtaacttgttcctaaatcaccatggaataagttcccaacccatcgagtatattgaacccatggagcatcattaagaccaagttgttgcttcaaacgagcaatttctttagggtctgtattagggttaatggcacctgtaaatggatccccaggcatcatctttgctaagaagaagaccaacacactaagtaagaaaatttggggaatcatgataagaaatctacgtaaaattgtcttccacatcttattcaccctccctttcaatcttatgaatttcttcttctggtaaagctacaaagtgatttcgactcacttcacgcaatggaaatactctaccatctttgtcataccatctagcttgatcttcttggaattccttttcaacagcctgacggtgttttttattttctgcacgatgttcaacatcaacttgcggaattgctgataataaacgacgagtataaatatgcattgggttcttataaatttcttcacgagaacctaattctaccaaccgaccacggtgcataattgccaaattctctgacatgtgcttaaccacacctaggtcatgagaaataaacaagtaagcaatgttatattgttgttgaatattcttcatgaagtttaaaacttgtgcttgaactgataaatcaagtgcactagttggttcatcggcaacaataagcttaggattggttgctacagcacgcgcaacaccaattctttgtctttgaccacctgaaaattcatgaggatacttataaatagcatcacttggcataccaacgatatcaagaagttcttgaactctttttctttcttcgtcagtagttaaattttcaaagtttctaattggttcagcaataatatcttcaattcgttttcttggattcaaactagacattgaatcttggaaaatcatttggacatctttgttataattaagctttttacggttggctggcttagtaacatcaacgcctttatataaaatttcaccacttgtaactttttcaactccgacaattgacttaccagtagttgacttaccagatcctgattcgccaattaatccgtaagtttcgccttcattaattgaaaagttaactccatcgaccgcttttacatagtctgtaattctgttccaaaagccagaacgaattggataatggactttaagatctttgatttgaataatttcttttcccatatcttattcccctcttgcttcttggtcatcttggaagtggaaattcttccaacaagtacatctaacccaatggccaggttccacttcatgtaatactggattttcttcatgttcactttctggaatccaaggaattcttgaagcaaaacggtcaccagttcttggcatgttcttaagtgaaggcacagtgccttgaataacatgcaaatcttcgtcttggtcatcactttgcggcatagagtgaagtaatgatcttgtatatggatgctttggattttcaaaaatagtttttacgtctgctttttctacaatttggccagcatacataactgctacttcatcagcagtttcagcaactacccctaaatcgtgcgtaatcaaaataatacctgattgagattctttttggatatcttcaagtaagtctaagatttgagcttgaatagttacatctaatgctgtagtaggttcatcagcaataattacttcaggtttacatgcgatagccatagcaataactacacgttgacgcaaaccacctgataattcatgtggatacatccgatacatttcttcaggacgtggcatcccaacttggttaaacaattcaataacgcgcttttttcttgcactttcatccatatcagtatgatagtacaaagtttctgcaacttggtcaccaacacgcattaaagggtttaaacttgccaacggatcctggaaaatcataccaatattattaccacgaatcttattgaaaagtgattcatttaaacctactaagttaagttcgttatataaaatatctccagtaaccttagtattcttatggtcgtacaaaccaataatgcttgaagcaatagtacttttaccgcaaccagattcacctactacggctaaaatctcattacgctttaaagtaaagctaacatcatcagctgcatcatagaacttaccttgcaaacgataggcagtatgcaagtgttgtacgtctaatagcagatcgctttgcttctccaaaggtcatccctccatctagctcgactaaaaaattaaaagccgattagttttcttaatttgttttctaattataaacaaaatcttaaaatcttgcaaggttctctagttattttcttattgatgactcttaatatagtcaacagcttgtccaactgtttctaactttgcagcatcttcatcagaaatttctgcaccaaaagcgtcttcaagatccataacaaattctaagaagttaattgaatctccatctaagtcctttttaaagtttaattcatttgtcactttatctgcttcaatatcaaaatgttctgctagtaattcagcaactttgttaaaaatttcagtttcgttcataagatacctccaacatatttttataaacagtttaagccaagcttaaataaaagtctattaatcttgctttgagaagtcttctacaaaaagcttaattaagtcttcctcaatcattttatcaatctgtaacaaggtgtaataaattgctcttttatcgcttctaccgtgagtctttactactggagcatttaatcccaataaaacggccccaccatacttagcagtatcaaattttttagctacaccttttaaagcgccttttattagcaaagcgccaagcttagtcattaaacttccacttaccaaggcatctttaataaggtgaataattacacttgaagttccttcgatatttttaagaacagcattacctgtaaatccatcagttgcaacaatatctgcttttccgtctaataattcattgccttcgatattaccaataaagttcaaatcactttccttaagcaattgataagcttctttatgaatatcatcacccttatcatattctgcaccattgtttaaaagcgcaatcttagggttcttaatgccacgcaccttctcagcataaaagtttgccatttcagcccacttaagaatatattctggtttagcttgagcatttgcaccaacatcaatcatattaaatcctagatcagaatttttaaccggcaaagttggcatcaaaccaggtcgttccacgcctttaatacgaccaacaataaaaattccagcagctagtaaagcaccagtattacccaatgacactaatccatcagctttaccttctttaacatatcttgctgctacaactagagatgaatctttttttcgcctaatagctctaaccggttcatcttcatcttgaataacttcacttgtcgcaataacttcaatttgcttatcatttgaattatctgacaacaactttttgattttatcttcatcaccaaataaaaggaattgggtatttggtagttgagactttgcttgtaaaacagcttcaataattgcctcaggtgcatgttctccacccatcgcatcaattgcaattcttctcataatatcacctaatctatttctttaaccttttggctataatctactacttcttttaaagctgaattttccattaaatctggatcagcctttacaagttgccttgccacattttgggcaacaaccattgtattatagtcatttactaaatctcctaacctaaattcaggaattccggattgcgcttttccaaataaatcgccctgtccacgtagctttaaatcttcttctgatagcttaaatccattacttgtcgacgaaattatttccattcttttctttccgatgtctgtttttggatcagctacaaaataacaaaaactttcagtccgcccacgtccaattcgaccacgtaactgatgcaattgacttaagccaaaacgatctgcatcaaaaatcaccatcatatttgcattagggacatctactccgacctcaataacactggttgccactaagatatctatatttccttctgaaaaatctgtcataatttggtctttatcttcaccactcatttgaccatgaagtaaaacaactttttcatgattgaagtaagactgtaactttaaacaaagctctttggcattttttaaatcaatattttcagattcttcaattaagggcgtcactacataaatttgaaatccttgactcaattgttcttttattttcgctaacacttggtcaagatgtgtactagtaacccattctgaaacaattggttttcttccagctggtaagtggcgaatttcagatacatccatttctccataagctgttaaagcgagtgttcgtggaattggtgtcgccgtcattgccaataagtcaggattttcacctttaatcattaatttttgacgctggttaacaccaaagcgatgttgttcgtcaataataaccaaaccaagatttttaaattttaaacttggctgaattaaagcgtgagttccaattacgacgtttaaagttccatccgctaactcacgataaatttcacgtttttccatcgcttttgtgcttgaggttaacaaagctatcctcactccaaatggccgcaataattcggcaatttttccaaaatgctggtttgctaaaatttcagttggcaccattaacgctgcttgataaccagctgttattgctgcataaatagcgaaaacagctactacagtttttccactaccaacatccccctgcaagagtcttcgcatttgtttttcccgatgtaaatcagcaaaaatttcattaacaaccttcttttggtcatcactcaactcaaaaggcagtgtagcggtcaatttctttatttcatttaaatcatattttttcgctgttcctaatcgcccctgtggtctcattgttaaaagagctaattgaatttgaaaaataaaaaattctctaaaaatagcacttcttttggctaattttgcctcattaggactctttggctcatgcattttttcaactagttcttgatcattcattaagcgatacttctgccgaatattttccggaacaatatccattaattcattcttttgagccaatgctaatttaattaattcaactaatttcttttgcttaatgtgccgattaaccggataaacgggactaagacttgattcttcattctttgcagctacaaatttaaagccagataagctttgcttggcgagattatatttaccataaactgccacttcttttccaacttctaactgattttttaaccaaggttggttaaaaaaattgaccatgataatatcatggtcaattctgagtttaaagcttaaacgactttttttgtaaccaaatcggctaacaaagggctcagtggcgactattcctttcaaaagtaccttttgaccatcatttaattgatctagtggaatcatctctaaatcgtcataacgatatggaaaatagaaaagtaagtcataaacactataaattgacaaactttctaacgctgcggccgttttcggcccgaccccttttagtttagtgactggttcaaataagttatttaacatctttctattctactgaaactaagaatgagtaaactggttgaccaccatcatgaatttcaaattccaaatcatcgtggtcttcttcaagtttagcttgaacttgctcagcttgctttttattactatcacgtccgtaaataattgttacgatttcactatcttcatcgagcatcttttcaatcattgcgcaagttgcttcaattaaatctggcttatcaatttcgatattaccatcaataatccccatgaagtcatctttatggatttcaacattattaatattagtatcacgaatagcgcgtgttacttcaccagaaacaaccatacttgcttcttcattcattgcttcgacattttcttcaacactagcatcagggttgaagaccaacatagctgttaatccttgagagatagtcttggtttgaacaatacccacaggaatatcgcacacttctgctgcttgtttagctgccataataatatttccattatttggcaaaataattgccttgcttgctccagacttcttaattgtatcaataatgtcttgagtagaagggttcatagtctgtccaccggagataattcggtttacaccaccactttcaaataattgacgcactccgttacctgaacaaactgcaattacagcaaaatcaactttttcctcttcttttgcagcttcatcaacaatcgtttcatgttgaattctcatattatcaatcttaattttgcccagctcaccaaattgttgtccataagtaaatacctcgcctggatgttcagtatgaacatggactttagcgattgtatcatcagaaacagctaaaagtgaatcacctaaagttgagaggtgctttctaaattcttctaaattaaatggcttctttcctggaacatctttagttaaatcaaccattatttcagtacaatagccatttttaatgtccttagtagaaagtttactttgtgattgttcatgagttgcactcatcatttgatccatttcatcaatatctggagtgtatacatcagagaagttttccccaagtaaaccttctaaaaagccttcgtaaataaagagcaacccttgtccaccagaatctacaactcctacttcttttaaaacaggtaataaatctggggtagtctttaaagcgcgtttggctccttcaacaatcgccttcataactacttcaacatcatcactatcattagctgcattcttaccatcctcagcagcaacacgagcaacagttaaaatagttccttcaacaggtttcataactgccttataagctgtagcaacaccattagaaaaagcatcagctaattcttgagcatttaaggcttctttgccaacagtagctttgtacataccacggaataattgagaagtaataactccactatttccacgggctcccatcaacattcctttagctaaagcttcaactaattcaccaacacttgtactttgacattcactaacagcgcgagcaccactctccattgtcaaattcatgttagtaccagtatcgccatcagggactgggaaaacatttaagttgttgacgtattctttatttttacccatacggtgagtagcaactctcaccatatctctaaattgtttactttcgattacagttaataccaatttaactcctccggtaagcgtttattcatcaagaaccttgacgccttggacaatcacgtttacagatttggtttgaatgccaagttgttgttccaaattatatttaacactgtcttgtacattacggcttacctctgaaattttgaggccataaccgacaattatatagacatcgacagtaattcgattatcaaccgatttgacaacgacgccacgcttatagttggcacgattcaaaatttcattaactccatcacgaatagcatttttagaagccattccgacgacaccataattagcagttgcagcagagccaacaacggttgcaattacaccattagtaacatcaattaggccatgcttggtcttaattttaactgccatattattttcctccgttctcaaattgggtaatacgaatgtattttatcatagtaaatacaataatcaaattagtacagattataaaaatagaaaaaattgatttcctattgcaattatagcccagctttgctatattattaaagtgttacttataacaagtaaaggaggtttagcaaatggcaaaagattttgttactggcaaaaagactactttcggcaacaagcgttctaaagctttgaactctacccgtagagcttggaagccaaaccttcaaaaagtgcgcattcttgttgacggtaagccaaagcgcgtttgggtatcaactaaggctttgaagtctggtaaagttactcgcgtttaataattttgataattaagcttaattatgcgaaaaagaccaaggaattccttggtcttttttgttttatgactatatatttgcaaaacggtcaagatctttactataaatcacggcaaccgttcctttttcaaaataaatttctactgttttgccagcaacaaactcattagatgcaaacgatatcggataagtagaattatagtcttttaaaggatatttagcgccttgtattgaaagattttcaacatctgttaaattaactatccccaaatatttataaccttctacaggcttaatatagtgcttaccaggtaaaaagaatttaattatattttgccgatcgattaaggtcactttaggagcatatacttggaattcgggctttaaaaaagtaaataaatttaccaagaaatgatctaatcttccacctgtagctccataaacttctagactagtcagatgataattttcaaaagcactttttatcattaattctgaatcagttaaatcttttacaggattagaatagcggatgtctttgactactttttcaatttttacaagttcttctttttttaaagaatcaaagtcgccaattgccaaatctggaataagacctttttcaactagaaataaacttccacgatcaacacctaacaaaagttgattgttatttttttgttcttcaaaaaagccctcaggtattagctcaagaggtcctcccaataaactaatgcccttcatttaaaattccttctaattttctaatttgcccagcaatatctccatttttaaaaatgtaagagccgcaaaccaagacgtttgccccagctttttcagctaatggcgcagttttatcgttaattccgccgtcaacttcaattggaatatttacattagcatccttcattaattgtttaagttgggcaattttatcagcagtttctggaatatatttttgccctccaaagccaggatgtacgctcattagtaatacttgttttaactcctttaagtaaggttttaaaacatttacatctgtttctgggtttaaaacaagcccagtttttacaccgttacttgccaaataatctaaccaatactctacttttttacttgcctcaaaatgaaattctagcaagtcagctccagcttgtgtaaaagcaggaatcattgtttctaaattatcactcattaaatgaatttcagcttcaactaaaggaaattcacgcttaaaatcttgtacaagctgtagaccatatgacaaattaggaacaaagtgtccatccataatatcaatgtggaatcttgtaattccagcttgtgtagcttttttaatatctcttccaagatttaaattatctgcatttaaaattgatggtgcaataatcatattttttccttcattttctatatttttaacttcttattttagatattctggtagcctttgctcctcaatttctgttcgaagtgctaaataatcatcatatctaaattgggcaatcttatttttagagagtaactcttttacctcacatttgggttcatgaatatgttgacaccctctaaatttacaaaacttacttgccttattcaactcaacaaaataattttgtagttctttaattttaattgggcctaaatcaattgctgaaaatccgggagtatcagcaataaatcctccagaataagtaaataattgtacacttcgtgttgtatgtttacctcgattcaagctcttagaaatctctcccgtatcttggcctgcatcttctttcaagaagtttagcaaagttgattttccagcccctgattgccctgctaaagtccaaatctcgttgtccttaatcaaggataacaatgctttttctaattttttcttattactaaagacactgtagccgatttcttcataataagataaagcactttttatagcttcaagttgctctttagtagctaaatcagattttgaaaggtaaattgtcactggtactttttgccattcaaaaaaagttaaaaatctatctaaaagatttacactaaaatctggttcaactgcggaaataacaagcaaaacatgacttacgttagaaacagccggccgaccaattcgatttttcctttcaaaaacctcaatcaagtaattggtcccatgttcatcaagttggacttttaccaaatcgccaacttgtggcttttcttgtcttttgcgaaaaacgccacgcgccctagttcgcactagaccgtttggcgtcattacatcataatatccagcaattaaactgattacaattccttccgtaatcatttagttaccctttcatttgttactgtagttccatcattaacaacaatcaaagttcctgagctatttttcacactaaaaggtatattcaaagttgtatcatgagtaatataaaaatcacgataaatattgcttatttgatgattatcatcagcaatataaatttgaatatgatttccattaccgttatttgtcttacttgagtcataactaattgaaacactcttattaacggagctagaatcacttgagctacccgaagaagatgaattacttgaagcagaagaactttcttgttttcctttagatacaacaacttctaaagtatcaccacggttcattgttgttccaactgttggattttgtgaaataattagacctttttcgactgaatctgaataatgctcatcaatctttagtgttaagccattatcttcagcatagtcttggactttctttaatgaatatcctgttaaatctttaaccttaaattgcttaggcttattttttttatattttcccttagaaacaaccaagataattgttgttttagctgcatttactcgctcgccagcttcaacactctgactcataacataattacggctaatttcaaaagaataatcggtttgtttttctactttaaagcctaatttttctaaacgttttttagcttgtgtatatgcaacaccaactaaatctggaaccgttgttaaacctgcacctttagaaacaactaaatcaacactcttacctttttcaattgaaagtcccttatctggtaaggtctttataattttgtcttttgcaaccgtatctgaatgctgatattcaatttctcctactttaagacctgctgcttgaagtgcttgcttagcttgttcctcgttaaaattacttacatcaggaaccgtcgtttgattagttttacttaaagccaaaataagacaaaacaaaacgacaagaattgcaaaaattgagctaattagccaaatcttatgttccttaaaggttttccaaaacttcttcttagccggcttggactcttgttttttctcttctttaatattttttaaggcagcatcttcattaggaataactgttggaataactctagtttcctctaaagcgggattgtgtgatggtttaaagacaggttcattagctctttcgggattaagagcagtatctaagtcagccttcattgccaaaactgattcataccgatctctagggtccttggcagtagcacaaagaacgacattctcaagtgactgaggtaaattaggaacaactttcttcaaatctggaagtggctctttcaagtgctttaaagcaattgaaattgctgtttctccaccaaaaggtacttttcctgctaaaagctcatataaaataattcccaatgaataaatgtctgattgcttagtaactaaaccacctttagtctgctctggtgacatataatgaacagaccccattgtagagttagtttgtgtaattgtactctgatttaaagcaactgcaattccgaaatcagcaattttaatttttccagtatctttatcaatcaaaatgttttctggcttcaaatcacggtgaattatattatgcttgtgagctagagcaaccgcgctcaagatttgatccataattctgataatttccgtaaaaggtaatggataattatcatgcaaatattgatgtaaatctggtccttttatatattccattaccatatacggaaggccttgatcagtatcaacatcaagcactgaaacaatatttggatgacttaattcactagttgacatcgcttcacgcgtaaagcgcttcagagtttgtggatcacgttgcaagtcgagtcttaaaactttaacagctacttttctttgtaaaatgatatcttcggctaaataaacattagccattccaccttcgcctaaggtatccagaattttataacgttcacctaataaataaccttgcgttatcatttttcttcacctgccttgcataaaagcaggcaaactgttatgttatctccgccacctaaccgatttgcctcagtaatcaattttttgcagcgttcatttaatgataatgacttagttgccaagatttgatgaatttgatcatcttctaatgagttagtcaatccatcagtacaaagcaaaataacgtcattttcttggataatagggcgattaaactcaggattaatagtacttgagacgcccaaagcttgggtaataatattcttttgtggatgatttcttgcttgttctttagtaatttgtcccatttttacaagttcattcactaatgaatgatcctcagtcaattgaataaacttttcacctgaatatagatatgctctcgagtcacctaaatgggcaattaatgcatttttttcaaagcaaattgctaaaaccactgtggttcccattccatttaaatctgggaagcgatcagcagcgcgcaaaatagtttcattctccagttttaattgaacttgcaaccatttttttgccatttctgctgtttcaaaatctgtcttagcaaaatcatgtcctaaatgactcactgccatagtagaagcgacatccccaccttggtggccacccattccatcacagacgactgccatttttatctttttttgattttcatatacttgaacaaagtcttgattagtctttctaacgcgaccaatacttgatgcaaaagctgtttcaatcaaattatttaacctcttaatttcatttttgcaataaagaatccatcactaccataagtatctggaagaatctttaaactactcttactttgaactttagataaagttatcggcattaactcaaattctggatgcttctttaaaaactctgctatcacttgctcattttcttcaatcgtaattgaacaagttgaataaaccaattcaccatttttctttaataactgtgcaacattatccaaaatagccaattgaattcttgctaaattatgaacatcttttatagttttatcatagcgaatttctggttttcttcttagtaaacccaagccagaacatggcgcatcaactagtattttattaaattttgtatcagagaaatgttctgctgcctttctagcatctaaagcaagcgtttcaacccggtcatcaacatgcattctttgcgcatattttttgattagatttaacttctttttatgaatatctaaacttgtcacttttccatgcgacaaattttctgctagttgggtcgtttttccaccaggggctgcacaagtatccaaaacatgatcattttcacgtaaatcaaaacaatcaactactaaactagcagcttcatcctgaattgttatctgccctgacttaaattcattagtattaacaatactatgatctactataaagcaattgtctgctaaagttgattcatttactgaaaagccctgtttctgaaggctattgactattttagagtgatctagccccttagcaactctaatactattttctgctcgctcatttaaacttatcaatagtttttctgtccgctttaagccccagttcttaacaaaatattgaactaaccattctggcatactttcttttatactcaaaaaatggacaggatctttaggactgggcaacacttgcccacgtcttaaaaatgaacgcaaaattccatttacaagccgaaagccggaagaattctttttaccaaagtctttagcaagcttattggcctcatcaagaactgctcgattaggtaccctatttaaaaaaattaattgataaacagacattaacaaaagaggcttgagataatcttcttttaattttgttcttaataagtcttttagttgatattccaaaaacaattgatattgaatcgttccgtaaactaattgagtaacaaaggcttgatctttttgagataaattattttcatttaaagcatggcttagacttaagtttgagtagcttttttgcttaaatacttttatcaaagtagctaatgctacagcacgcgctgaattagtcatcaataattacttctcctagcttcaaacttgatcctttaccattcatataatcacgaccagccattctcttttttccagttggctgaatttcagtaagattaagaacagtattatcagcaaaacttaccgcaaatcgtttatgattatctactaaagcacctgccggaaattgagtagtttcatttgttacttctgaagcccaaaccttcattctttgaccattaattattaaataagcacctggatcagggtttaagccacggatcaagttgtgaacttgacttgcagtcatatctttagttattctttcttgttctttactgatatttggagagaagactaccttagaagtatcttgcggctttttatcacagctaccatcaataatacttggtaaagttttaagaagtaaatctcgtcccaaaattgccattttttcaaacaggctgccagcagtatcatctggttcaattgataacttttcttgagcatacatatcaccagcatccatttctttaaccatttccataatggttacacctgtttccttatcaccattaatcaaagaatattgaattggtgcaccaccacggtactttggaagaagcgagccatggacattgacagccgcaatcttagcactcttcaaaaacttagttggcaaaaattgtccataagctgctgtaataattaaatcagcatgtaaattaatcaaagtatcaagttcttcacttctaggtaaacgtgcaggttgataaattggcaaatcatatttttgagccatttccttaacaggagaaggagttaatttttgctttcggcccacttttttatcgggttgtgttactacagctaaaacttgataactgttctttattaatccctctaaaactgttgcaccaaaatttggtgttcctaagaaaataactgatgtcatattcatccctctttcattaaaatattcttcccggctgagtatctatatatatatttaagccatatttttgcttctcttgagccaagtcttgaatttggtgaagcaattcattcaatttaggttcacgtttatattttaccagtatttgataataatattgattatttattttggaaatagcacttggagtaggccctaaaatgattgttggagcatgcaagttgcgcattaatattctcttgatagcaaaagcttctttagctgcattttgctcattttttgaagctactgaaattaaatttgtaaagaaaaaaggtggataatttccttgatatctaaccttcatttcagtttggtaaaaagtttcataatcctgtttttgagcaagttttattgcataatgatcagaattataagtttgaatcataacttgcccgcttttttctgctcgtcctgctcgcccagcaacttgtgttaataattcaaaagtcttttcacttgcattataatctggcaaataaagtgctgtatcggcattaattactccaaccaaagttacatttggaaagtcaagacctttagcaatcatttgggtaccaagtaaaatatcggcgtttcctgcaccaaatttatctaaaatttctttatagctacctttacgccttgttgtatcaacatccattcttaaaactctagcaccaggaagtaattctgttaattcttcttcaactttctgtgttccagttcctaagaagcgaatcttactactttgacaattaggacagcgatttggaattggttgatgaaagccacaatagtggcaaatcatctgccttgtatctttgtgcatggttaaagataaatcacaattaggacattgtaatacaaaaccacaatctcgacagagcataaagctagcaaatccacggcgattaagtagcaaaattatttgctcattttttagcagtttttctttgatagccttaactaaatccgttgataaatcaaattgacttccagcaaattcgacagatttcaaatcaataatcttaacttctggaagtgctttttgattagctcttttagttaaccgcaataacttataaacacctttttgtgctcgtgcgcgactatcaagagatggggtagcacttcctaagaccaagggtgcattatgaaatttacttctccaaatggctacatttcttgcatgatatcgcggtgtatcttcttgtttatatgatgcttcatgttcttcatcaataataattaggccaatattacttaaaggtgcaaaaatagcgcttctagctccaacaactacccgagcttcaccacgtcgaattcgacgccattcatcatatttttctccctctgataagccactatgtaaaaccgccacttcttttccgaaacgtgcattaacttggctaaccatttgtggtgttaaagaaatttctggaacaagcattaatgcattttttcccctttgtaatgcattactaatagcatgtaaatatacttcagtttttccacttccagttattccttcaagtaagtaagtttttgactcagacctttcaatactttcatttatttgttgcaacgcagcagtttgttgctgatttaatgtaatactttttggcttagttcttttggaaaaatcagtcaaagggtttcgatactgttctttttctttaactcgaagcaagccttttttgactaaagtattaattgctgaaaatgataaattatatttttttaattgttcataatcaaatgggaattgctgaaaatgttcaattataaactggaatagttctgcttgttttacggcatttgaacgtagactttgcttaattgtttgataattttctaaagtagatgtaagataataaacttttttggtcttttcttttgctttattttcaactgcatattcaattttagccaaatcttttttcaataattgattaatttgggcaatttcttctaaattagtaactttagccaaatcaatacttttttctttaaaaattggcaagtcttctgcttctctagttgctggaactaatattttacgatactttgctctcatgacactaggtagcatagtttgcaaaattgaaatacgataagaaaaaattgtttttgctaaatattctgataattggaccaattctggagtcaatggagcttgttcatcaactactaacagtaaattttttagctttccttgatactgactagtttttgttaagccaacaacaaatccctgtaccttccttggaccaaaaggaacaactacgcgcgctccaattgttaaatcggaaatttgctttggaatattatactcaaaaattcgatctgtttgcttagccgcaacatctacaattacttgcgctatcatatttttcacctgctaaaaagaccctcatcttagcgatgaaggtctaactaactaatcaatattagtcttatgatctgggtcaataattaccttacctgcagcaatttcttctaatgcttgaccaactgacttagatgatttaaatttttcaagtgctgctgggctacctgcttcaagctcatgagctctttttgaagctaaaactgataaagagtatcttgaatcaactctatctaataatttgtcaattgatggatatgtgattttcatatattagtcctcctcaaccattttccgatatgaatcaattacgcgcttaacactaacatgttctgcctcaacaattgccttaatgtgactaactgcatttgcgacagtatcattaactactgcataatcataatcagacatcatcataatttcattacgcgcttgcttcatccgattttgaattacagtttctgaatctgttcctcgatgaactaagcgatgctttaattcgtgcaaatccggtggcgttaaaaagataaaaacaccatctggcatttgctgacgaactttttgtgcaccattaacatcaatctcaagcaaaacatccttaccttcgctcaacatcttttttactggagctaacggtgtaccgtagtaattgcctacatattgattatattcaataagctcaccttggttaatagcttctttgaaacgatcaacacttacaaagtaataatcttttccatctacttcaccaggtcgaggttttctagtagtcattgaaactgaatattcaaatggaaaagccttagtttcaacaattgcgctttttactgtacctttaccaacaccagaaggtcctgatagaaccaataataaacctttacttgccatgattgctcctaaaaatcattaataattctatattgcactaaactagcagatttttcaagtttcactacttttttctcataattaaattccaatttttccaaacatattttcgaattttgcttgcatttttaaacgcttgttcgtataatttaatcaaacagctgttcgagattgatttaggatttaaaagtgcgtttaggagattgagagtatgaagaatttacagcttattggaaaaaacttagtaactaaaacttttaacttgtttgaagatatttttgcttatgatcaagatcaactttctattgttggacaaaaacaacattacattttaactaaccttagctatgctttattacatcgcagttatattttacttacacttaaagataataccaatattattgggaaaattattaaggtcggccctaataataaaattatcataaaaaatattgataccgatgcaattaatatcgtcaatattcctgatatttttcgaacagatattgcgtaataaaacaaaaagctgaaaagtttcgcataatagcgttacttctcagctttttatttacttttcatgacttcttttaattaaatctgcagcattttgttctgcagctgatgttatattaattccggccatcatttgtgcaatggcttttacactatcttgatcactaagcatatgaacctgagtgtaagtattgccatcttcaacatgcttttcaattttataacgccaatcactacttgccgctacttgaacagagtgcgtaattgcaataacttgcttttgctgtccaattgaatgcattttctttccgatggctgctgacactcgaccagaaaccccagtatcaatttcatcaaagaccattgttccaacaggttcaacctttgaaaaaatagtttttaaggccaaaatcaaacgggattgttcaccaccagaaacaattttgacaagtggcatcaactcttcaccagggttaggagctatgtaaaatgccacttcatcagttcctagttcattaaaagtttttgattgaacaaatctgatagaaaatctagctttttccataaataaatctgctaattcagacttaatttcttgttcaagttgtgagctagttttttctcttaattgatgaagcttttgagctgatacagacattttatcttctagttggcctatttccttttgaagtttatcttcatctagaccacccatttcaaattgactaagctcttttgaaatcttttgataaaaatcaaatacatctgataaatctgggccatacttcttttttaagttattcaaggtatctagtcgattagtaacatattggaatctttcttcatcaaaatctaaattatccattatattacctaattcacttcgactatctgataatgaatataccccatctgataatgactgggccatattcttaaaatcagatccatattcggctagctcatctgcagcattttgtgcattacctaataaagttgttagcccttgctcatcatcatcaaataactgcactaaataattagcagtttctgcgattttttgataattattgagttttgcatattcttgttctagcttttcatcttcgtcaatatctgttaaatcagcagaatcaagttcatctttttgaaattgaaggatatcatgccgttgagctaattcctgagcacctttttgtaaatgctttaatttatttgttaattctatccattttttaaaaagtgtctgataattctcaagctcaactttaaaatcttgacctgcgtattcatcgactaagtcaatttgcctatcttgattcattaatatttgttgatcactttgtccatggatatcaactaaatattgtcctatttgtgctaaaactgtaattgtcgttaattgaccattaattctgattacatttcgccctttatttgataattctctactgataatcagatcatcaccatctaaaggtaatccatattcatcacataaattctcaacaatttgtttttgagtttcattaagtgtaaaaagacccgttacaattgcctttttttcacctgaacgaatcatttcactttgggcacgatgacccaaaagtagagagagtgcatcaattaaaattgatttccctgccccagtttcaccaatcaagacagtcatgttcttcttgaatttgattttcagatttttaataattgcaaaattctgaatgtctaattcaactaacattgttctttctcctttaaagctgatttacagcagcatcaattacagatttaatatcgccatcccatagtagctgactaggatctgcaagatttttacgaagatgaattaaaaactcaatattaccttttccgcctttaataggagaataatcaattcccaagacatcaaaaccgatttctaatgccttttcaatggtatgtttgataactgcttcatgtacactgtgatcgcgaacaataccatttttccctacatgctcaggtccagcttcaaattgtggtttaattaaacaaacagcatcacactgatcttttagtatttcaaacataggtggcatgattaaatctaatgaaataaaagaaacatcagtcattgcaaaatcaggtaaaccatctgtaaaatctgctgatttagaatatctaaagttttgtctttccatcacaactactcttgaatcatctctgagctgccaagccagttgattatagcctacatcaagagcgtaaacttttttggccccattttgcaatgcaacatcagtaaatccaccagttgatgcaccaatgtctaaacataatttgtcagttaaatcaatgtcaaaaacttttagtgccttttctaatttaaagccacctctagatacatatttttgaccatcatctttaatataaaaatgttcatcttctgggaatttttccccagccttatcaattctttgatgtaaatgatctgtaactaaacccgccataattgctctttgtgcttgagaacgggaatgaaagagtccttgtttaaataaaattacatctgcacgttctttagccattacaacacctttttatataggtctaagaatcctaacaatacttcactatttaatccatctaaattagattttgctgccgaaatcaattcttttaattcttctcgactttgatcaatccctagcaaagttaaagtattatttttaccttcttcttcgtccttatgagttgctttgccagcttcttggctagtctgaataacatcaactaaatcatcataaatttgataagctcgcccaaaattagcactaaaatcaactaagttcttacgcaaaagatcatttgcattagcataaattgttgcaagttcaacactagctttaataaggcaaccagttttaagccattccattcgattaataaaattgttatcttctttaacagcttcattattagttgaatcaatatctaaatattgtccgccagccatgccattggggccaattgcatttgccattacagccaccatttcagcatttttagcactagcaatccattcaagccccataggtaataatgcgtcacctgccaaaattgcctccgcttcgccccattttttatgactagtaagcattccacgtcgataatcatcattatccatcgctggtaagtcatcatgaattagggaatacgtatgaattaattcaattccacaagcaactcgtatttctttttcattaatttcttttcctagagaaattaatgttgccaaaaaaagtaatggtcgaagtcttttaccacctgccataactgagtaagccataatttggctaaacttcttatcttcaatttcactagctaaatgttgttcaaggtaatgatcaataattggttggtattttttataaaagttggtaaattctgtcattttattcctctggtgcagctgcattttgtggatctaattcatgttcagagccgtctttatcaattaatttagcaactgtttcttctgctgctgttaactttttctctaaatctcggctaattttcactccagcttgaaattgttccaaagcttcatccaatggaacattaccattttcaagattattaactattttctcaagatctgctaattgttcttcaaaattattttttttacttggcattttcattatcctctacttctaaaatcttagcttcagcattaccatctgcaaaatgtaaatttaagacctcatccttggctatatttttaactgacataaccgtctctccagcttggttacttgtatatatatatccccgacctaacactttaagaggactgatatcttcaagggtttggacttgttgttgaaaaagagttcttttatctttcaaaaaagttttcattgcactgaataatcgctgatttaaataatcattactttgtttagttcgttcaagcaatcttttgggactttgcgctaataacttttgctcactaatttttaaattttgacgattattctgcaaaataactttgataatctgcatcagtcttccggctagttgatcgacactttgtgcttgttgatcataaagacgcattggttcacgcataataggagagttttgaattctttgaagtgcctgtttacgttcccgaatgcatgattgcatacttgttaagagtctgctttgcaactgatgcaatcctgctaattcatcgctcaaattaggtgttgcatactctgctgctgctgtcggagtagctgctcgagcgtcagcaactaaatcacacaaggtcgtatcagtttcatggcctaccgaactaatgacaggcataggcatactatacacggaacgaaccacttcttcttcattaaatggccataaatcttccagtgatcctccgcctcgtccaataatcattacatcatattcatcagcacgctctttgatttgctccatagcatttaccaaacttgcagctgctgtttcaccttgaacttgagcagggaacagatctatttcagcgtgcggaaagcgccggttagcggttaccataatatcatggataacagcacctgatgcgctagttacaacagcaatcttatctggaaatcttggtaatcttttcttatgttcggcagcaaaaagcccttctttagataacttttcttgcaattgacgcaatctttcatacagctcacccaaaccagctggctccatcgtttgagcataaaattgatatgagccttgtggtggataaacgccaatataaccacttacatagactttcataccctcttctggtttaaattttaacttttcaaaggctgatcgaaacattactacattaattttggctttttcatcttttaatgaaaaatattgatgggaatttctacgatagcgaaaattagataattcaccttttaaaaatacttgatgcaaatatggatcgtttttaaattttaaattgatgtaataatttaaatcagaaacagataaatatttatcatgactttccattttgtctccttgtcaaggcaacaacttgttgcattaaactctcaacagtcaatgggccaaccccacctggaactggagtaatataacttgctttctttttaacattttcgaaatcaacatctccaaccaaatgaccgtcgattcgatttataccgacgtcaattacaactgctccttcttttaccatatcttcggtgacaagctttgcctttccaacagcagccactaaaatgtcagcttgctttgttaattccactaaattcttagtatgtgaatgtgctaacgttacggtagcatttctttcaagcaataatgcagctaatggcttaccaacaatattgcttctaccaatgataacagcctttttaccatcaattgaaatcttataatgatctaataaatcaataatgccacaggctgtagcaggtttaacaaaatgtgttccttgccatagacgacccacattagttgcagttaaggcatcgacatctttttctggattaattgcttcaattaaatgatctgaattaatttgacttggtacaggaagttgaaccattacaccattaatttggggatctttattcaatttttggattagggtcaaagcttcttcttcagtagtttctgcaggtaattgaaaaatttcttgatcaattcctaatttctcagcacgtctttttttcgctctgacatatactttgctcgctggatcatcaccaatattaattacacaaaagtgtggcttaattccgctagcagtcattaccttaactttttctttaatttcttcagataaaacgttagctaatgccttaccatctagtatttctcccatcaactacatctccttaacaaaaaatgccggcaaatgccggcattaattacttgcttggcataaaatttgccaaaattccgttgataaatgatttagattttggatcatcaaattcttcacacaaaattaaagcttcatttacagctgctggagctgaaattgcatcactttgactaatttcgaagattgcgacttccatgattgctacagaaattcgatttacccgttctaaacgccagccctttttaagatacttgctaatatcagcttcaatctcaggtctcttagctaaaacaccagcaataatttcatgagcataagcagggatttcttttaaatctaaacttttagcaacttttgtttccacctgttcaatagtcagatctggttcgccattagcgagaaaaattgcttgcattgcaattctacgactatcgtgttgcgacattattccccatccttttctgactcaggaaataattccttcttgtcttcttctactttagtaacatgtgctttttcatctgggaaaataaggccaactacatgtacattaaccgtagttaaggttagatccgtcatttgagaaagttgcccagccaacttttcttggattttggcagcaaccttaggaacattaacacctgcatcaaagtaggcatagacatcagctactatcttgtgatcttgattaactgaaacagctacacctttaccacgatcttggcgtcctaagacccagttcaacccagactttaaactaccacgcatcgcagcaacaccatcaactttttcagcagcgattgctaaaatcacttccaaaacgcttaaatcaatcttgatttcgtcaccagcttgattactggtcaaaagaattgttgaactatcagccatttttcttacctcgtaatattaatactacttattagcacgtgatacataactaccatcagcagtgttaatagttaaaatatcaccagcattaataaagaatggaacatttactactaaaccagtttccattgtagctggcttaccaccaccggaagaagtatcaccacgaatacctggttctgtttcagcaacttcaaggtcaacagtatttggtaaatcaattcccaaagtttcgctaccatgcatgataacattaacttccatgttttcctttaaaaacttagattcacgatcaacttcagcatttggaatttcaagttgttcgtaagtgttcatatccataaatacataacttgagccatcgttgtataagtattgcattggcttagtttggatatcagctgtgttaactttttcagttgagcggaaagtgtagtcttgaactgcgcctgttcttaaactctttaattttgaacgaacaaaagcactacccttaccaggcttaacatgttggaattcgataattctccataaatcattattatgttcaatggttaatccgtttttgaactcattaactgagatcattgtcataagtaatccctcatttctacttaaatatcttaccaattataggtaaagatttccatactcttactaatttataagtgaattagttcatcttttttaaacgatgacatagtttctggactttctccattaactaaaatatcatcttcaattctaacaccgcctttttcaggaagatatattcccggttcaacagtgatagccatattattaactaatttttgctttttgaaaggtaaggctggcatacacaattcatggatttctaaaccaattccatggcctatcccatgaccaaaatatttaccatatccttgctctgagatataatctctggccgccttatctacatctgacccagtattaccaactactgcagcttcaattcctcttctttgagcctcatgaacaatcttatatattttctctaattcaacatctacattaccaactgcaacagttctagtaatatcagcagtatagccatcataaaagctaccaaaatcacagactactaaatctccttgttcaattaccttatcactggcaacaccatgagcccaactagaacgcacacctgaagcaataattgtttcaaatgaaggcccatcaccaccattaagtttaaatagataatctagctttgcagcgatgtctctttcaactgctccaggtttaatcatcggtaaaatttctttaaagctttctagtgaaatggaaatagccttttgtagagcttgtaactccaactcatctttaacatttctaacttgttcaacaagttcttctacaaggacaaattgacaatctggattagcctcttcaagttcagaaaactcagttgctgaaataaattcaccttcaacaattagtttctttactgctagcttttttaaaactcgactaatttcatttacttcgctagtttgcttcataattgcggtcaattctccacttgcttgagccttgatttgaccggcaaatctagaatctgataataaatagcgatcaccactatttgtcaaaattaattgagcttcttcacctgtaaaatttgttaaataacgatagttagcttgattaaaaattaagaaggcatctgcattatattgcttcattaattcaagaactttgttaatccttgcttgtgtcaatgtcaaaagtaaagagtcagtcataagctatacctcaaatattaaaaaagaccgaagacattatgccttcagtctgcaaaaaatagtcttattttgcttcttcaactgggtaaacagaaacttgctttctagttttaccaagacgttcaaacttaacaacaccatttactaaagcaaataaagtgtcgtcaccaccgataccaacgttcttacctgggtggatcttagtaccacgttgacggtagataattgaaccagcgtttactgcttgaccgtcagcacgctttgcgccaagacgacgaccagctgagttacgaccattggcagttgaaccaccacccttgtggtgggcaaataagttcatagttgaaaagttattcatcatcataatattattcacctcttattaagcttcaatgctttcgatagttaccttagtgtaaggttgacggtgaccatatttactgtgtgagtgcttcttaggcttgtacttgaaagttacaaccttcttttccttaccttgcttttcaacagtagccacaacttttgcatcttcaactaatggagtaccaactttaacgtctttaccatcagaaacaagaattacttgatcaaaagttaccttttcgccagcttcaacatcaagcttttctacaaaaacactgtcgcccttagcaaccttgtattgcttaccaccggtcttaattactgcgtacatttgtacacctccataaaaaatacttagactcgccaagccaggtgccttcacatgaaagacttgtgacctagcatgtgcggttgcagatgtgaggtttcacaaatacaactactttagtttactaccctgacacttgttttacaaggaaaaactctattatttaactaacaaaattattttatacagcacttcccaaggtaaaagttatgacgcctgttaaaacaccagtaaaaatatttctaaaaattgcttttttgacagatgcttcactattaagagtactaataaatgcattaagcgctaaagatattatcattgcaaaaagcgttattggaattcgtaaattcattggtgataaagtcatggcgcatagggggataatggctccagcaataaaagaacaaaaagaacttaaagccgcactaataggagttaagccatctgtttttttcagttttaaatcctcatcaatagtctgtttttctaacttcttcatcaagatatctctttgggtagaaacagacatccattctccacctgccattgagcaagctccggctagcattcctgaaagacccgcaattaatagggtcttactgtctaaattagcaccacttgctcccaatacaattcctgaaactgagataataccatcattagcacctaaaattcctgctctaatgatatttagtttatcccaaaaacattgtgattttatttttataaagcgactaaatgtaaaagctcttttcaaagtttattctcctaaaattggtctatcaatcaaacaaatatctaaataatttattttagacattatcatgtggaaatcatgtgtaaacggctttttttattatccaataccgccagacatgttgagctgtatgagtcggttaagttctactgcatattccattggtaattctttcgtaaacggctcaacaaagcccatgacaatcatttctgttgccttttcttcactaattccacgactcattaaataataaagctgctcttcggaaatcttcgaaactttcgcctcgtgctccattgatacatttgaattcaagacttcattgaatggaatagtatcacttgaagacttatcatccataatgattgtgtcacattcaacatgggcaaatgaaccatcacaatgctcgttaaaacgaatatggccacggtaatcggcaataccgccatctttacatagggacttggaaacagtacttgaataagtatttttagcgttatgaaccatcgtagcaccagtatcagaatcaatatttttaccggcaaaggcaatggataacatatttccatgggcaccttgtccatttaagtagatacttgggtacttcatcgttacctttgaacccaagttaccatcgacccattccatagttgcattttctaaagcctgagctcttttagtctctaaactatagacattgttcgaccagttttgaatcgtagtgtagcgacaatatgcatcttttaagacattcacttcaacaactgcagcgtgaagtgaatcagctgaataatttggagcagtacaaccttcaacatagttcacgtgtgcgccttcatcaacaataattaaagttctttcaaattgcccagaatttcccgcattaattctgaaataactttgaattggtgttggacaactaacgcctttaggtacataaataaaagtaccacccgaccaaactgctgtgtttaaagcagctaacttattgtcactagctggaactaactttccaaaatatttcttaactaaatcaggatgcttttgtactgctgtatcagtatccatgaagataattcccatatcttcaaattgcttgcgcatattgtgataaacaacttctgattcatattgggcactggaaccagctaaatattttcgttcagcttggggcacacctaatttatcaaaagtctttttaatatcttctggcacatcttcccatttacgagcaacaaagtcactgtcacgtctgaaatagttaatgtgttcataatcaagcttggttaagtctggcccaaaagttggtaaagataactttttataggtttcataagcagctaaacgaatgtcgagcatccacttaggttcatttttagctgctgaaatttttctaacaacttcttcgcttaaaccttcaccagtcgtataaatcggttcaatatcatccttaaatccatattgatattgaccacctagattttttattgcttcatcagtcattatttttgtccttcataattttcaattaattgataaattgccttccatgctaacgttgcacatttaattctggctggaaattcttttacaccttcaagcatgatgcagtcacctagttgatctttttgagcttggctaagttcttcagtaatcaggcttgaaaagagtattacttcattttttattttagaaatttcttgtcctaaaacatgatcagtcattaaactagcactagcttggctaatcgtgcagccataaccagaaaaggcgacatcaactaacttattatctttaaaatagccatctaaaactaaaacatccccacaagaaggattatgaagttcaacgcttgcatttttcttagttaattggccatggtgtctaggagcttgagctgcttcaacaatgctttcacggtataaatcagtcaaattaaagctcattttccaaaaaactcctttatcttttttagtgaattagctaaagcatctacatctgaataatcattataaatactaaaacttgctcgcaagcatgctggaattttcaaataattcattagtggttcagcacagtgatgcccagcacgtaggcacaggtcatctgcatcaagaaagctagctacatcatggggatgaacgccatctaagttaaacgaaattatgccatggttatggccgtagatggtaataccatcaatttcttccagtttatttttagcatatttacttaagtccaaatcgaccttttcaatattggtaatccctacttgcttcaaataatcaattgccactcctaagccaatcgcaccagcaacattttgagttccagcttcaaatttaagtggagcagctttaaagtcagcactttgttcactaacttcattaatcatttctccgccatattcaacaggttgcattttagctagcaactctcttttaccaaaaagcaccccaattcccattggccgaaacattttatgacctgaaaaagcataaaaatcacaatcaaactttttcatatcaagtactgtatgagcagctgcttgggcgccatcaactaccaaatatgcaccaaaattatgagttaattcagcaagtttacttatatcaagaatatttcccaaaacatttgacatatggtgtaaggcaacaatttttgtctttgaatttaactttacttcaaagtctgcataatcaaagtttagatcagcagttaaatagacataaactagcttagctccagttttttgagcaataatttgccaaggaaccaaattagaatgatgttcttcaatcgaaattaaaatttcatcacctggctttaagacttgctcggcaaaaccattagcaatccagttaagcccttgagtcgtccctttggtaaaaatcacttcatctgcttcagaattaataaagcctgcgactttttttcttgcctgctcatactctgccgtagcagcttctcctaaaccatacaaagcccgatgaacattggcattttgagtttgataataattagttagagcatcaattacacattgcggtttttgactagttgctgcactatctaaataaattaagtcagaattggccaatagtggaaagtctgctttatagttatttttcactgatctttctctcaattaaatcactaaacacttgttttaaatcagcagttggaatctcttcaagtactggcgataaaaagccgcgaatcacaacgcgttctgccatctttttatcaaggccgcggctcatcaagtaatagagctgttctggatttactcggccaatacttgctgcgtgacccgccataacgtcgttatcatcaattagtaagatgggatttgcatccccacgtgcaccttgactcagcattaagatacgactttcttgttcagcgtcactgccttttgagcctttcataatgtgaccaactgcattaaaaatcaaagttgatttatctaagctaacaccatgttgcaaaatgtgaccaatagtattattgccataatttgtaacgcgggtattgattccttgaatctggctattagtcgaaatacctactgcctttaattcagcgtgactaccatcaccaactaaatcactattaaaatcacccaaagttcggccatcattcatcaaggccatcgcccaatcaactttggcatctttttctaaataaccccgacgattcaaataagaagtaacattttccgccaagttatcaatacttgtaaagtgaacatgactatttttcttcgcaattacttcacaaacaaagttaactttacttttttcattgccttgactggtaagcttttcaatatatgagaaactacttccttcatcaacgattaataatacatggtgaacgtattcagatgctaatgcagccttttgtaaatattcacaagtcagcggtatttcaacttgcacatctttagggacataaataaataatccactttgtaaataagcaacatgttcagctaaaaactcatcatcactagcttttaagcccttagtcataaaatatttttgtactaacttagggtaattttgtaaagcttcatgaaaatcagccacaattaccccttttttgcgatattcatcagggaggttaatttgagctaaattttcgcctgcttgcgcgacattggcattagccgtaaaagtctcagttgaaacaaaattcccagttaagtgtaagtcccaatctttgtattttaattttttaaaatcaggatatggagtttttccaataagttgactagctttttcgcgaatttcttcaaaccaagttggctccaaacgctttttagctaaagtttctacagattccattcttcagcctcctatgcgtcttcatcaactaatttaatatctaatcctaattcatcacgaagttttgcatagccttcattttcaagacgttttgcaagacttgcatcccctgttttaacaatttttccgcccatcatcacatgaacaaagtcaggttcaatatagttaagtaaacgttggtagtgggtaataagcaaagcaccaaagttatcgccacgcatcaagttaacaccacgtgagacaacctttaaagcgtcaatgtcaagcccagagtcaatttcatctaagattgcaaaagatggtttaatcatcatcatttgcataatttcattccgcttcttttcaccaccagaaaagccttgattcaaatagcgtcctgccatttccatagtcatatctaaagttttcaaagtagattgaagttctttcataaattcgcccataggaacgggatcattcttaggacgacgtgcattaacagctgctttgacaaattcagcattagttaccccaggaatttctgcaggatattgcattgctaaaaaaagtccagcccgcgctctttgatcaactggccaatctaagatactctcaccatttaataagatatccccactattaatgtgatattttgcatcccccataattgttgaagataaagttgatttaccggtaccattaggtcccatgattgcatggatttcaccagtactcattttaaggttaagaccttttaaaatttgcttttcttcattgttgtcttgaactgaaacatataaatcttttacttctaaggttgacattattttctcccattcgactaaaaaatgtgttgttataaatataagcatacaacatattagggataattcaaatatatattcataatctttcaatatcttgtatattgaaaagcttaactttattaaaaaattaaacctcaaaaattgagttcttcattcttctttttaagttcttctaattgcttagctgtttcatcttgcttcttctcagggtttttatccacctgttcttgcttgtacttatccagctcagcttgaagttccttaatacgatcatttgcaacatgcttttcatgctgttccttgccgattcgattcttcaacttttcaagttctgaggtaagtttgtcataatccttaccgtcatcttgcttttctggctttggttcagcattaccagcttgttctggcttaacttcttggccattgttagttacatttggttgttcttcgttaggcatattcattgtcctttctaaactcgcatttaccgtcgtgggagacactcaggttgttctttaacgcctacaacgcacggaaaaaggcataaaaaaagaactaacgtgttgttagttcttagataaattgataataatattaagatttaccgtgtctttttttccaatcatctaatgatttaagcaaggcttctcttgttttttcataataatcatcaggaactcttcctgcatcatgctttcgcttccagaagcggagtgcaccttctactttcttaggccagactttttctaagtctttagtagcaaattcgaaatcttcggtgaatcgatgtgaataatcttctttatcactcattattagtttcctccacaaatacaacatattttttatcaattttatcatagtgccaattaataaacttgaatcgtgtatttctaggaaaaagcacttcactttctttgtcatttgcgccaattgatgcatctatatgacttaaatcaacaccactatgttgctttttaattatcatatgaatcaattcttcgccttccgcataatgacctttgcttgttgaaatataagctttatcttgataatatccttgttctttccatgatttaacaatttcttttgcgtcttcaatatcatacatggacatggattgagagaaatctcttgaaactggtttatcagatctatattttggtagtttagccaatgcctcgtcaagattattaactaatttttgttggtcatcacttaatttaacatcatttctaaggcagtcatttaataaataagattccgcactcatgtactgtttcaatgctgcaactttgtcaaagcctataatcttctccatttcttcagatgttaatggactttgatctgttgttctggcttcctctttattctcactaacccagtgagcactaattgcacacctacagttgggatgtgtatcttgcggtatatctggtactttttcaagttcccatacccctttgccccaaccgttatcagttctagctatcctattacaagtactacatgctttgggttcagctatccatttaacatacttgtagtctgccttagttattgaatctttctgggctttatattgaactctggcaagctctgtattaatcaatctctgggttacatatcgccagttattgactgtagtctgcaacaattctttcaatttctgcctattagaattagttgctccagtcgttaataactggttaactgcatatctcaatccctgttgattagcccacagcctttgcgaccaagtagccccttttacagttgcattaataacattccgcatatctggactagcatatagcctgtcagctggttcatttaagcctaagatacctgcttgccgtttagattcagttttatatctttgtgctaatctattacttgcctcattgtagatttctagtccaaccttttgaatttctaggccaacattagcttttaacagctccagcctattaattctcattgttgcattataaacacgtaattcttgatttacagcgtcaggataatcactatagctaaccttattttttatcttagctgctttttcaactatttgtttggccttagttgaatatatgcttacgtccatttgactaacttgttgcattgccaaatcgattgaaacatgattgcgatttgctaaagatgaatattcagcatcaatctgcttattgatattatccagcattaagttgtaatgagcttctagctctttaagataagcagaatcctgattaatatatttttgattggcttctttttctagttcatccctgttcttccaataatcacttctcgtcatcgctatttaccttctggaagtccattgcagcagggcttagctgactaactcgcttcatttcctcgtctttttctttttccatacgattaatttcagacttaggatcatcaataaagctaagtagagagagagctgtttctttagatacaattcccgaagcattaactgcactattaacttcatcagcaatattagctggcatatttctagtgaactggaatgataagtcttgccatttattttttgaactatcaggaagtacagtcccaacactaaagataatctgatacaggtgtcttaatgaatgaacgaatttccgttccttgtttgaagcacgattcttcattgggaggagcttatactggagtgcaacacctgaactgttaccgctgaaagcctggtcgttcatgttaggaatcatcgcagtttggaatatccattcggtcagtctattgataaggttctcttgcatgttgtcgccatctggcttagatacgaagccaatcttgccgttaactgctgtatcagctggagcataaatgaaacgatcgttcttcaaatcaagcataggttgtcctgtatctctatccttttctaattgaatacggagcatgtataagtaagcattgtcgaagtattcaacctggtttgccttctgactaagcgcacggtctaattcgttgataagggtgatacaaccatcaaacacaccttgtctttcctcattctcatagaactcaacagctggaactagcttatataaattaggagtaggctcaggattaattgctggtcctacaaagtcataactagcgtcagcataatagatagtccctttagcggttgcgtcacttgaattgtcatagtgatagcgtacaaatgccaatggctcacgattgactgtgtcatcatagaccataaaagcatggcttggactgcagtatgtaactctagtctgactatcctcatcttgataaacgaaagcataggacttgccataaatatcggcttgcttggatatttcgttcagcttgtccacaaaactattcgtgttgttccagtcttggagtttttggttttccttatcatcatcgagtgaaattttaggtgcaattcctgagaagaaaccgttatatgtatctactaagtacttaggcagattaaccactagtcggttgtctgcaccagtctgcttagctggttgttcaagcactgggtggtgtcctaagtaatagtccatattagtgcgataatgaggcttgagatggctatcgttgtaattgataaactcaattaaatcattaccagtaagttctgtgtctttgggataaataaaagagcgattacttgaaatcgctcctttgcctcactactcattgagtctaatccgtatatcaaaccatcagatgttcaggcaatactgggacacgaaactgtagagatgactctcaatatatatactcacgttaccaatcagagcaagaaaaaagttgctcaatcgataaatgatttaaatatttaagccagcaattattgttggctttttatttttatctaaaattggtctagttgctttttatatttttatttttgctcaagttggttaaaagttggttattttcaaccaaaaaagcccaagtatattgatataccgggctttttattcttctgggtggagatgaggggagttgaacccctgtccaaacgcattccatcactaacctctacgatcatagagatattatttgaatttcattaggttcaaacgccatatatcagggctagtagaacctaactaacctgcaaattctcttcttattctctcaggtggcaaaactaagcgtaacctattagagttgataccaattagcaaccataggtgaatcgctaagaggcaacacacgctgactaagcagctaatgcgtaagaattattgttttttgcagttatatttaactgataacgtttttacgtagacgtaacctacgaatcgcagtcagagcagatctacgcctgtcgaatcccaaaacatccccataaaaaaggacatagtaattataacgataaattactatatcctcaagtattttgcttaatctaagtgtgctaaacgaacaacatcacgttcaatcatcaattcttcatcagttggaacaattaatgctgcaatcttagaaccctttttagaaattaacttttcaccatttgtcttattagcttcaaagtctggatcaagacccatgcattcaaatgatttcataattcctgcacgaatattggcatcatgttccccaattccagcagtaaagacaagagcatcgataccacccatttcaactgcatatgaaccagcataacgaattacacggttaacaaaaatgtcacgagctaattttgcacgctttgtgtcactactttcaaggtctctcatatctgaagatatgccattaataccaagaagtcctgacttatgattcaaaatatcaatcatatcatcaatgttcttaatcccttctttatccataatgaattggattaaggatgcgtcaacatctccggagcgagttcccattgtaacacctgctaatggtgaaaagcccattgaagtgtcaaatgacttaccatcttttacagcagtaattgaagccccagatcctaagtgacaaataatcatcttgagatcggataaatctctatgtaaaagttcagctgttctattcgcaacatatcttacactagtaccatgagctccatatttacgtgccttatatttttcataatattcaaaaggtacagaataaaggtagtgaacttcatccattgtctggtggaaagaagtatcaaaaacaccaacttgaggaactcctggaagcaagttcatgaaagcttttatcccacgaccttctgcaggattatgtaatggtgcataatcagttaaatccaaaattttttgtaagtttttttcatcaataatggcagaatcagtaaactcttcaccaccactaacaattctatgaccaacacctacaatttctgttaaatcattaactacatcatactttttcagccaatcaagtaagattttcacagctgtttcttgatctggtaatgcaacttcttcgcaatacttttgaccatttccaaacttcatttcaaaagtagaaccagcaagcccaattcgatcaccaagaccttctgctagaacagtttcatcaggtaagccaaataatttatatttaaacgatgaactacctgaattaatcgctaaaacttttttcatagagtgatactcctttaatttaatttcacaaactatctttttttagtataccactcgtttaatttttggttgaagtcaactaaagatttttcttctttaagtgaaccaagtttagctaataatacatccctactttgcgcattttcaccatgattttggaaaactaacaaagacttttgattcaatggattttggaataaatcgtttggcaactgaactactgcttgtaaatatactttcttagcaagccatggcataaattcagctcctagttttccacctaaaagactatttgggactaataaaaatgcataaccagcaggagctaagtttttaattgtttgttcaactagtaattcatgggctaacgaatgtccttctttggcttgagtagcaaaattcttggcatttttatcaattggataataaccaacaggtagatcggatactattacatctggtttttcaattaaccaattttctaatgaatcttggcaatacaagtcaatcttataattgtttaaatgtgcaccaacatctgctaaatcgagcattgattcatcattatctattcctgctaaacgatattggttttgagaatggtggctttgcacaagttgatcaataaccgtatatagcaaactccccgttccaattgctggatcaacaacagataattctgttttagtaattaacttatcccagaccattgcaactactgttgccaaaactggcggagttggcatttgagaatagtttcggccatcttctttcattgcttttagagtcaataaagtaaataccaagtatttttgagtacttggaagtttatcataatttaattcctgatattttttagatagcaaagctacagcttctttatcaggtgcacccatttctacttttatcttgccattttctaaattatcaaaagtttcagttacagcaccggcaaatgggacatttaagtttttttgtaaaatttgaactacttctaaaaattgtgcaaaaattgcttcaatatttttcatttaatcaaacccctttttcttctataacattttaaaagaaagaggttatgacatgcaagggaactcacttactttcaaagtatttgactaaaagttggttattttcaacagtctttacgaaaataaattgataatattgcaaaaaaagcaaaatagctaataacaagagaatcgtactaatcaatatactaccgtttatcctgacttttatcatcttgttccattttttcatcagctggtttatttttactagaaagatcaaaaaaccactcactctctccgtttttccactcagtaattcttacttttaatttctgaccatctatatcaaaatcgctttgtttcactttcattaataaaggtatatgtccaccttgacttgcggttaaacgcaacattgatttgttgtaatactcaagaacataattagttacttttcctgcttcttctcgcttaaatattaccttttttgaattactttctttttgatcaatctcaatataatcgctcgtttcaataaagttatttaattgaacatagcttaaaaccaattcattaccatagtgttcaacttgtcgatactgtttaaataaccccaataaattagttagcatcattaaacaaagtaaggtaattgctatgcttattattgcttctactaataaaaagcctttaacttgtttaatcttcatattcaattccatgaactttaattttatgtaaatgatattttctcaatatataatgagcgtatgctcgatcactctttatttgcgaattggcttcaatttttcttgtttcagtaaggcaataaacaaacaaatttagacacaacaataaaataattagactaattgctgcttcaatcaatagaaagcctttaacttgtttcattgatttttccccactttaattgaatccgaagttgctttttatagtgttcagtttgaaaggttattgtttttggcgcaatataacccgtttgctcaatattagtttttgccaaattatatatctttacctcttcaggcaaagaatatttttttatttttccatttggttctttaacaattaataagttatccgacctataataatcaatcatataaagcctattagtaatactagcctgacgtaatacctgattaagaataactttaacttgcatactagtattatcaattagcattttttctttaatagtagaaaaatttaaccagtcaatcgtgagaatcattgaaacaattcctaatgtaataaccgtttcaataagggtaaaagccttaatcttatttcttaacaacttcaccatttgtaatcacaaatttttcttgtgcctttttagcttgtttctctgaaatatatttagcttctaataattgatcccaagaagttatttttttaccatcttcttctgccaaagtcacttgtgactgcaaggtagtctgaaatgcctcatccgtcttggcttctgcattacttttttggttagttaaattaggtactactaagattaataaaattgcaataatcgcaactacaattaccatttcaattaaagtaaatcctttaacagtttgcatttttaacttttttactaaatccttaaactttttcatcatattcctcctacatattttgcatcaatgcatacattggtagtaacatcttcaaatacatcccaattatgcaaattccaataaaaataaaacaaattggttgtacattaacaatcattcgttctaaaccttgcgtcaaatcacggaaaaagcctttagccaaaattgtgcattttaagcctagttcttttttattagcaccggtttctacaaacaaaagcaaattatctggcaaaaaaacttcatttcgaataatctctgtcatacttttacctgcttcaaattgcgcaagcatttttcttcctaaatattcctgtaatgagccttcttcttgtctagcaaacaacttacaaatttctgggaaagtaaagcctgcacctaacatcattccaaattcagaacttaacatataaaaaacgtataatctcgttatttttccaataattggataatgttgcaatttctttaaggcattataatcctgcttttttagtaaaatagcaattctagctatagctccacttattccgagagccataataataagactcgcaaaaactaaatttgcagttccatcttcttgtcctaattgactactcaagaagttttgcataaatagcaacataaaaatcattaaaacaaacaaagttattggataagataattcggcttttagcttttttacctgttgttcttttaaacgattaataataactaattgactgagacattcatttagatttccctgcatcatcgctaagtcaacttgactggcaatggttttaccaaagcccatttgctgtaaaatttggctaaagttaaccccttgtttcatcaaatatgttatttttttcaataacatttgcttttttgaccataaagctggcataacttgtaaactctctgctaaagataaaccattctttaaagacatggccaaatattctaaaaattccaattgctcctgagcagttaacttatccttcctgaaaattggtaaaactatcgacactaattctttcctccttcagcagttctgctaacttttcttgccaattaataaagtcaccaggctcagctttattaatttcttttttcaatttttctccacttacaatatccaataagcaggcatttcttccattttttgtttgaattaatcgttgataacttacacaatttagacaattagctaattcaactgaatctattcctaatccctttaatctagctattgtttgtaaagtagacctagcatgaaccgttgccaaaactaaatgcccactaagagccgcatcaaccgctaaccttgctgttactttgtcacgaatttcaccaataattaaaatatctggtcgctgacgcaaggcagcctttaacaaactctgataatcaattccagcttcatgatttacttgagtttgtaaaaatgctggttcaaacacttcaacaggatcttcaattgtcatcaccactttgttattagccaattttttagctaaataatacatagttgaagtttttcctgagccggttggcccacttgttaatatcaaccctcttttaattgcagcacccattaaaatatcaagctgttcaataaagaaataatgattactattaatttcggtaattaaccgaataactagtgactccttaccagaaaattctcctaaaacagaaaaacgtaaaaatattgattctttatcttttttgaaaatgtaactaccaacttgtggacggcgatgctctgaaatatccatctgtgcaataaatttaaaataattaataacttcttgaccaaactctaaactcaacttttcttgttttattaaacctttactagttcgaaagttaacttcataaaaatcctgttttccagaaataaaaatatcacttgtacctagttctttcgcagaaattattaaatcttcagcccaacgttttacttccatatgtatcctcctttctaatcaataaatacacaaaatcagcttatttttttctaaaaaaagacttgaactaaattagttcaagtcaatttattatctattttaattttcaattggctttttgcgaccaactacccagcaaataagtaaagcaagacatgcttcaataaagatatacaatcctcgtaaagctaacttggtaccacccaagtaaacatctaaaacaattgaacctataatcaaagcaagcataataatccattgcttcttagaaaaggcaataccatattcaacttcacgtcttctaatccctggtagaatcgttcctaatccaatcaaaacaacaactgcaataatattaatgattaattcataccaccaaatatcactaaactgctttacatcttgaggagctattcccaaaatagttgcaactgctgtaacaaccaataatgctaatccagctaaataagctaatttatcatttttaatgtaaacatattcagaaggatatttttgggaatcttttcttacacgcataaatgaatagaaaatccaacaagttacacctggagaaataataccatttaagtttaacaaccagttaaaaatatcattcatatcaggtaaaaagacacctaaaagcattataaatgctgaaagagaaacagttaaaatataaccattaattggcaagccatccttagttgtcttacgtaaaaattctggcatatacttatcaccagtatcagaaataagcattctagtcattgcatctaataaaactgctaataaggcagcattataaaatacagaagtccaggcatatacatatagcaatgtatgacccataccaaattgctgtccaacagcttcaaagacatagtaagaaccattcatctttaaatcatttggcatatgatatgcatcgaaataaattcccaaagcaaatgagccaaagatagttaaaaatgctgtcattattgctaaagcaatcatagctttagggaaatcagtcttaggctttttcattctagttacatatggcgcaactaactctgatccattaactgcataaatcagcatcccaactgtagtccaatatttcaaatcaaactttggaatcatcgtcttccaagtaaatggctgcgtcgccatatgaccaccagattttgccaaaccaacaaaagctaaaaagacaaaaagcatagtcatgataaacatcattgccccgccaattgttgacaagacttccattgaattagcaaactttctttcaataaaaataaaaataataaacatcaagaaagtcaaaagtgtaaattgtgcgttagaaatattgtcttggaatttttctgaaccagtaaaagcccatcccacatcaacaataatttcatttgctgaatcaacaacataaggaattgaagccgcccagtaagtccaagcagtaaagtagcctaaaaattctccatcagttccacgaacccaagatgacagaccaccaccacctttattaaagattgatcctaattgaccaaccattaaagcatatggaataacatataaaaataacatcaaaacccaagacgtcataacagtcataccttggttttggaagttatacatgatgtcatccaagccaataaccgtaacaaacgccattaatgttaaggtaggccaggaaatatatttcttatcttttatcaaatcatccaattttattaccccgtaaaaaaatatttaaactatctattttatctacctggtaataaaacaggtgatttatttttcaacttcgaatttatttttcatctccaaatttattgtaacgtttactattttactgtttacttcttgtaatttctatatcctaaataaagatttccacaaaaaaagcctcataatcgagacttttttgtgatttacaatattgaaatattatttagatacatcttttaacttttcatagttttgtgtcatccatttaagataacttaccccattaggcatagtttcgcgcacttcaattattggaataccagcagctttacatttcttcaccaaagctttaactgtcgcactacttgcttgagtattatttacaaagaaagcaatttcattacgactaattgccttattcattttttcaataatctttgcacttggatccgtttcattttcaatagcttcttcaaaatccttattaccaatcttaaagttagctgccttcaaagcgtaatcaaatactggttcacttacataaactggtttagaatttttcccatcaatagttttagcgatagccttaatttcagcaatttgtgctaaataattttcaccattctttttaaaataagaagcatgttttgcatctaatttggataatttcttaaccaagtagttaacataatcttctggcatatctaagttataccaaatatgtggattatcactactctttagcttcatgatatcttcgccaactttaacagctgtcttgccattagatttagctaatttgctcatccaattgtcgtaccccataccattagcaatcacaatattagcgctattaattgttgtagcagacttagtagttggttcaaaatcgtgtggatcaatatccccattagaaattattgcttcactactaccatatttacctacgatatccttggcaatgtcggcataaacattagttgaagtaacaatttttataccattactcttttcgctctttctttgtgaacaagctgtaactaaggttaaactggctaatgctaaagccataattgtaaatatttttttgattttcattcgatttcctttcttataaatgtaaatcatagtagagtatacttaattatcatttttgtcaaggtggtgcaataaaatgcaaaaatttaagttcagcaagaaagaaaaactcagtctaattcttgcgttagtcgtttttataagtctttttatttccagctcgatgacctatcatgagcaaaagatgagttcaacgacaattaaaacttactttggttttcttgaacccattttatcacatatatcaattaattacggtggacaaattcacagtgcaagtaaagatggactaactaactttacgcaattttttgttagaaaattagcccatttttcaagttatttcttattaggcttaggcttattcgccggaattaaacgattctttctaaataaagtttatgctttcatttttgtctggccagttataattagcctggcagtacttgatgaatatcatcaatatctaactggtgatcgtacaccaagcgtacatgatgtagtacttgatagtgctggagcattatgtggaattctattatttttgctatatcgcttatttattaaaaaaatccacgaaaaaagacaataaaagcttaatataaattgaatttactaggctttagcggtaagattataaaggttaactattaaatacagaaagaaggattcttatatgtcaggacattcaaaatggcacaatatccaaggccgcaagaatgcacaagacgcaaaaagaggtaagattttccaaaagttatctcgtgaaatttatatggctgcaaagagtggtggtcctgacccttcagggaatccagcattgcggttagttatggacaaagctcgtgcagctaatatgcctaaggataatatccaacgtgcaattaaaaaggctgaaggtggctctgacgaacattacgacgaaattacatacgaaggttacgcaccaggtggtgttgctgttttagttgaagctttgactgacaacaaaaatagaacagctactagtgtacgtactgcctttactcgtaatggtggtagtatgggttcaactggttcagttgcctacatgtttgaccgtaaaggttatattgtaattgatcgttcaactactgatgctgatgaagatcaaatgttaatggatgtaatggatgccggtgcagatgacttacaaacaagtgatgatgcatacgaaatctatactgatgctaaagaatttactggcgtacgtgatgcattggaaaaagctggttacaagttagcagatgctgaacttaccatgattcctcaaaacactactccagttccagctgataagaaagaacaatttgaacacttaattgatgccttagaagacgatgatgatgtttcaaatgtttatactgcagctgctgatgaagattaatcttcattaaaaaagcttattgggaaaaatcccaataagcttttttcttattcattttttagattttcaattaaaacttcacaagcttgcttaatttggcgataacttgtttcaaaatctccagtaaaccatggatcatcaatatccttatgtgagcccaataaagttagtaattttttctcttttccatccggatctccgccagtaatcctatttaaatcgagaaagttctcttcatccatacagaataaataatcatacttttgataatcttctctagttacttgactagcttcatgataagtataagggatgcctttttcatctaatttacttttggcgcgacgatccatatcatggccaatcccgctagcattaatttcatctcgcgttgttgcttttgaatcaaattctacatcactcaagccggctttttgggctaaatttcgagcaataaactcagccatgggtgatctacaaatgtttccatggcatacaaataaaactcttttcatcttatctttgtgtctttctataattatggcaaactacttcccaaacgatacttgctataaccacaacaattactgctgtcaggaaattaggagaaattgttactttcatgccagaatatagaatttcatcaagaatagtagtagccttttcactagcaaataataatcctactaacatccccgctgatgacaaaactgctgtaatcccagcaaatcgtttaccaagtagtaccaaaataatactaatagcaaagcataaaagcaaggcataatatacaagttgatataaattcaaagcattttttacatcttcattatttcgttttaaaccagcattaattccaaccgttatatatttactaataaacttttcaccactagttttacttggtaattttaagtccttacttgagaattttccctgctttttgtaagtactgcttaagttataaacttcaagaggagtaatacttacttcactcttttttggtaaatgactcaacatttcatcttctaatccacttgaagcaaataaactagataagttaccgaaaccagcatcattagcaacgtttgtaattaattgtttagcgtacaaacgattattattacttttcatgttaattgagcttgttaataaaagtaataatgaaaacgcaaacgccagtgacacaacaattttagtgactaaataagtaatttttttcatttacatcatctttcccaggtaaaatccaacataaactaataataatcccaataaatatgaactaagtgcataaaataatccaattttatctttgcgtaagccaactaactctttattcaatgttgaaaaagttgtataaccccctaaaacacctgtacctaaaaaagtatatatattcttatctaatccaagggcaaatattaatccaagacaaaatgcgccagtcatattgattaaaaaagtagctcttggccataaatgatttgtttttatatttactgttaagaaataacgaagagctgcaccgagtgctgctcccaagcctgcaaaaatcactcacttattcctctctttcctagaaaaacaccgactttcatacctaataatgcacataaaaagccaaatataatcgaaagtaagaaataagttacagccataaaactttgactagaattaataaactttaaactatcaagttcaaaactggaaaaagttgtaaatgccccaataaagccagtacctaaaccagtatttagccactctggtaatcttttactttcaataacaaaataagtgagaaatgaaagtaaaaagcatcccaataaattacaaattacagttcccatggcttgataggctcctgataagaaataacgacaaataccacccaaaaagccaaaaactgctacacttaaatagactcttattttattcatattttcatctccagaacaattgtaagtttaccgcaaaaaacgctttaaataaagcataaaaagctctcaaagctaagctttgagaacttttttgatgaaatattaattaaatttggttctatttaaaagtaaagagctagcaacaactgaaatggaactaaaagccattgctaaaccagctaattcaggacttaaaactaatccttggttaacaaaaactcccgcagctattggaataccaattgcattatagataaatgcccaaaaaagattaattttaattcgattaaatatttttttagaaatctgtaaggccttaagtaaattattcaaatcatcttgcattaaaaccagatctccactttcaatcgcaatatcagttccacttgccatcgccaccccgacatcagcagttgaaagcgctggagcatcatttattccatccccaacaaaagctactttagcatctttttgtagttttttaacctcatttgccttttcatttggtaaaacctcactaatgacttgattaactccaatatttttaccgatttcattagctacattttgattatcaccagtgaggataacacttttcttacccatttttttaagttcggaaattacaaaagctgcattatctcttggaatatcttgcatagccactactccaattgcctcaccagcaattccgacataagcacaagtttttgcctgctgctctaacttttttgcagcatctaataacttttggcttaaattagttgccatcttttcatttccaataaaaatttcttggccattaatcaggccagaaatcccctcacctttatgaactttaaaattagatacctcataacttggtaagtcatatttagccgcttcattcaaaaacgccttagcaagtagatgctcactattttgctctagattcttagcaagagtaagaacttgctttacatctccaacgatatctgttactactggttcacccttagtaattgttcctgtcttgtcaaaaacaacagttgaaatttggttaatttcttcaagagcttgaccattttttattaaaattccatgcttggcacttaaattagtccccaccattaatgcggttggaattgccaatcctaaagcacatgggcaggcgataactaagacattaacagcaaaaattaagctatgatcaaaaggtgcagaaaataccacataccacatttcaaaagttatgattgcaataattaaaacaattggaacaaaaaattgagaaaatctatcagtcaatctttgaataggtgcttttgaagtctgtgctctctttacaaattcaacaatctgactaagtaaagaatcctgacctaacttagtaacttggtaataaatgataccatcgtaattaatagttgccccgactacattgtcgccaatgctttttttaactggtaaactttcaccagtaatcatagattcatcaacatggcttgttcctttgacaacttgcccatcagcagcaaactccatcgctggtttaacaaccagaacatcgccaacttttattttttcgactggtatcttgatttcctgcccattttttaaaaggatggcatctttagcctgtaattttaaaagactttttaatgctccattagcccgcttacgcatgccttcttccagactatcaccgagtaagataaataagataataactgcagcactttcaaaatatacttcatgccccagagtcattgcataaatgctataaaaataggcaactaaagtgccaatagttactaatgtattcatattagcttgtccttttttaaaggcagcccaagcactaatataatagtccttagccgctattaccagaattaatgtcgtcaaaactaaggctagctcattataatatgggaacacaatatgaaaaggcataagcaccatttgaaaaagtaatggtgatgacaaaagcaaagtaattattaccttttttcttgcacttattgtcattatttaacaactacctttccatgaaacatattcattccacaactataattatattcaccaatctgatctgtcggaacttttattgacaccttttcacctggtgcaagttttttatctagtgctaaatcacctgactttatttcagctaaacatgcagttgaatccttttggacgaattctacttctgccggaattcctttctgtaataccaaagtagaaggactatatccaccttgaatgataatttgcgctttttgtttatttttacttgtcttggcagcttcgatatcgttgacctttctgataaagaaccaccaaataataaatccaataatcagaatagcaattaaaattgaaataattcgcatatttatctccttttttaacattgatggtttctcttactatgtaagcaatcacatggaatggtatctggtgctgactgttccataatattgagttctctctgtatttcctttatcgcagatttagataaaggtatttcttttatcaatcgaattaacaaacttcccttatgcatatcacacatatgagaaaacatatccttagtcacttgatacatcatctcattttcagaaacggttgcactataaatataagcacgcccttctttttttatcttaactaatcccttatcaactagccttctaattaaagttttgatagtagattcagtccaagacattttttcactcaattgatctattatttcactgctttttacttcatcgagtgtccaaattatcctcataacttcccactcagcatcagaaatattcatttttaaaattttgtctaccatatcttcacctccattgtttacatttgtaaacatatattaagtcgatacttactttttgtcaataaaaaagccaagtaattaaacttggctagctaaaattttatttaatgcataagcaatcccatcgtcatcatgatctttagtgacaaaatctgcacgttcctttaaagcactaatggcattgcccatagcaactttataaaagttattattttcaaacattgacaaatcattaccttgatcaccaaaaacaaccacttcattttcatgaatacctaaccgatgtgctaattgatgaattgccaaaccctttgaggctactaaattattaacttcaattgtatctgttcccagtgaagaaatgccactacttgaagcattccatttatcaaaaaagacttcaggcaaattttgtttaaaggctttaatttcatttgccggtccactgaattctgctttaataaagtgaaagtcttcgggtacttgctctaaatcacgtacccgaattttcatattatttagtgctgaggcagcagccatgataattgatagattccgatccatcgtgtagtaatgattttctgtcataaaatgcaaattaaccttacctaacttttggtaatgaagaaattctttcaaatcagcatatgataagtcattacttattaatttctcccctgtaaggcgttgtactactccaccattaaacaaaattgcataattatcatgtcctgagatattaagttcttttaaatatggaagaactcctggtaatggtcgacctgaagcaggaacaacttttattcccattttatctgcacgctgtaaagcttttttagtttttggacttattctatgatctgaagttagcaatgttccatccagatcagttgcaatcatttttattgccatttctatcctcacaaaacaaattttttaagtgctttggcaattccattgtggttattgtcgtcagtaacataatcagctaaattctttatttcatcaattgcattacccatcgcaatttttttgaaatttgggtttgaaaacattgagatatcattaccttcatctccaaaaatcattacttcatcttcttcaaagcccagccggcttgctaattcagctaatgctaggccttttgaagctgctggattattaaattcaacaatagtttcagcacttctaacaacattatattgatcaaatacccaatctggcaaacgatttctaaaacgtgcgatttcatctacagaacctgtaaattcacatttaatataagtaaaatcttttttcaaatctttcaaatcacaaacatggatttcattatttgtggtacttgcattaatccccatctgaacattaattatccgatcaaaagtataaaaagcttcagttgtttcaaagtgcatattgacatgagctaatctctgtaaatgtttcatcgtttcaacatcatgcaaattttgttcatgactaaaaagaacttttccactataagattgagcaaccccaccattaaaaacagtcgcgaattgttgatccccttcaagtcctaattgtgctgcatatggcaaaatacctgatagtggtcgtccagaagctaaaacaacttttaatccttgttttcttgctaaagtaagcattctttgcgtttcagcagcaattgtattatgtgacgtcaacagagtaccatctaagtcaacagcaagcatttttattgtcattttagtcctcccaaaattactttctaaaatatatattttattgtacaaaaaaagactgctatctgcagtctttttatccatcaattaatgaaattattcgcccatttcagcttttacaacttcaacaatcttatttacataagcatcagtttgttcttgagttgggccttcagccattacccgaagtaattcttgtgtacctgatggtcttacaagaacacgaccatcaccattcatttcatcttctacttctttaataacagccattaccttttcattttgcttccatgccttcttgtccttaactggaacattgattaagcgttgtgggtattctttgaagtccttcaaaagttcagttaacttcttgcctgtcttcttcattacaagcattaagtgaagtccagtaagcattccgtcaccagtattgtggtaatcactgataataacgtgaccagattgttcaccaccgagattgtaaccgttagcacgcatttcttctgatacataacggtcaccaacttgagtccggatattctttaatcctgcacgctctaaagcttttgtaaagccaaggttactcataacagtagttacaattgtatctttcttaagacgaccatgttcagctaagtaagtaccaattacgtacataatgtggtccccatcaacttcgttaccattttcgtcaacagcgatacatctatctgcatcgccatcaaaggctaaaccaagatcagcaccttgcttaacaacttcttcttgtaacttcttagtatgagttgcacctacatggtcattaatgtttaagccatctggatgagttgcaatagtagtaaaatcaatgtttaaatcagcaaacaaacgtgaaatcaaatgacttgaagccccatttgcgccatcaaccacaactttaataccatctaaatcttctggaatagtttgttcaataaattgtaagtactttgatgcaccttcatgataatcagttactgtacctaaacctaatgctgatgggcgaggtaaagtatcttctggggcatcaattaattgttcaatttcttcttctttagaatcagataatttaagaccatcactaccaaagaacttaataccattgtcttgaaccggattatgtgatgctgaaatttgaacaccagcatctgcaccttgagcacgaactaagtatgacaatcctggagtggtaataacccccaattccaatacttcaattcctactgacaaaagtcctgaaataagtgcatattcaagcatttgtccagaaatacgagtatctctagaaactaaaacctttgctttttcgccatctttcttgtgtttagttaaaacataaccacccatacgtcctaacttaaaagccatttcaggagtcaaaacttcattagcaattccacgaacgccatcagtaccaaaatattttaacattacaataaactacctttcttatgaacctgactgtgttgaattggcaactgttatcctcacagctactacatcttcgcttgccttaattaccccattaggcaattttagctttatctttttagtctgtgaactagaaacattcttcaagtcaacatctgtgtcaagttccttaatcttcttcaaagcactgctcttgccataaatagtcacactagtggtttccgcagtcaatgaataaaccttatcactagattcattcttcgggtttagcttaattttaacagtctttttcggtaatgtaataggaatctttacatttactgctaaaggattaataacaacatttagctgtgaacccttcttatcttctgccactaacataacttgttgttcaaaagtttttgttgtattagttggcaaaacgactttggcaataatcttgttaatttggtttacttcactttttgcaccagtaacactaactactgaaggatctgcttttgcggttccaattgtatatgcatccggcacaacatttttattatactctatttgaacaggaagcgaacgagattttcgtctttgaatattaactgttatttttttcggattaattgagtaagctaattgcttattcaaatttgttactttaactttaattgtatgtttacctacacttaatttagttaaatcaatgtacactcggaaattttgagtattttgtgttgatgtaaccaaagcactggcaccagacaatgtcatcttaactttttcaggatagccagttacataatagcgatctgtatttacggacacctgtaacggaacactaattgtaacttttttagttgcagtttgttgactggttgtttgctctccttgagtgaaataaccatgttgagttgtatcaatatagattactaataaagttgcagcaagtaaggcaattatcttataaaaccaaggtttatcgaagaatttgttcatcggtctgcaccccaattccataatctacctaatactttttggaaaagtgtctgctttacctcatcttgaggtaccaactcactagttaaatacttcatatattcgtctctagtcatgtctaacataaattgactatttttagtaattgtaactccacctgtctcttcagaaactacaatagttatcgcatcggtaacttcagaaattccgacagcagcacggtgccgtgtacctaattttttaggaatcatactattatctgataatggtaaataagccgcagcaacagcgattcgaccatttctaataataactgctccatcatgaagtggggtattaggaataaaaatattaattaataatgcacctgtaacttctgcatctaatcctattcctgtttcaatataatcatcaagacctgtattacgttgaattgttatcaaagccccaatacgtcttttactcatatattgaatcgccttatctagttcagcgacaaatttttcagacatttgtcgttctgttttggcattaccattaaaaaatggcattcttcccagatgttcaagtccacgccgaatttccggttggaaaatgactataaccccaataaccgaccaagataggagttgatcaacaatatatgcaaaagtattaaggccaatccatccagcaacttgtctagccacccatatgatgactaatccttttgctagctgaactgcttttgttcccttaataagcattaacaataaatacaaaatataccaaactactaaaatatctattagaattgataaattctgccaagtaaagaaattagtaaaattaaaagacatttaaaccctcctatcattaaattttattatacctttttagcgagaatacatcttaaattctaagaataaatcattatattcttgcacttttttaggaggtaagtccttataaacttgtaaatgattaatggtgtttttatctggataaaattgcttgtcatcccgaatagattttggcaaatacttcatcgctgccttgtttggcgttgcatatcccacatattctgcattttgagtagcattttgggcatctaacatgaaattaataaatgcataagcagcttttttatttttagcagttttaggaatgaccatattatcaaaccataaattagagccttcttcaggaactacataatgaagatgggaattattatctaacatctcacttgcttcaccagaccaagtaacagcaagagcggcttcattttgaatcatgtacattttaatttcatcagaaattattgctttaacatttgtccctaaactatctaacttagttttggctagttttaattcaactgaattggtcgtattcatcgaataacctagtgaaactaacgagaatcccataatatcacgggccgaatcaactaataaaattttatttttccattttggattccacaaatcattccagtgctgaacctcatcagatttaacatacttatcattatagataatacctaaagttccccagaaataaggaatagaatattgattatgcttatcaaaagactgatgtaaaaactgcggattaagatttttaaagttagatagcttatttgtatctatcttatccagtaaattggcttttttcatcttagtaatcatatagtctgatggaactgccaagtcatagctcgtcccaccttgtttcactttggtaaacattgcttcatttgagtcaaaagtttcataaatgactttataacccgtttgtttttcaaatttagtaatcaaacttgggtcaatataatctccccaattatatataatcaaagtttttttggaggaagtagctgatgaagaatctaacttattggcagctaaactaagtcccaaacaaagggctaaaataattactgcaccccaaattaattttttcacttaataaggcccccaatctctggcttattacccttatggctatgacgggtagttaagagataatatccaccgactaatacaagaacaattaaaaacattaaagttgataaagcattaatctctagatcaattccttggcgtgcacgtgaatatatttctaccgataaagttgtgaagccattccctgttacaaaaaaggtaacagcaaaatcatctaatgaataagtcaaagccatgaacaaaccagatagtattcctggtgtaattgctggtatcaatactttactgtatacctgccaattatttgcgccaagatctcgagcagcatcaatcaaagacttatccatttctttaaggcggggcaataccattaagacaacaattggaattgaaaaagcaatatgactaagtaaaacggagccaaagcccaaactaagtcctaatgcagtaaaaaacactaaaaaacttgccccaataattacatcaggcgacaccattagcacattatttaatgatagtaataccgtttttttcttcttattcttagtaccatcaattgcaattgcccccatagtaccaataatcgttgcaattaagcttgaaagtagagccaacataatcgtatctaagaagattgctaaaagtcgaccgtcagcaaataaatctttatagtgcgttaatgtgaagccatgaaagacatccatatttttcccatttgaaaaagaaaaaacgattagataaaaaattggcaaataaagaataaataaaactaaagctaaatatagtcttccccaaacttttttcatagttttacctcctttttgcgcttattcttttctcctgtcaaaaccattacagctaccatcattacaatcagtattacaccgatagttgaacccatactccagttcattgttgttgtaaagtattcctcaatcgcagttcccaatgtaataactcggttaccaccaattaatctagtcaacatgaaaagtgataatgatggaataaaaattgcttgaacaccactttcaacaccaggaagtgataatggccaaattatataacgaaaactctgccacttacttgcacccaagtcattagctgcatttatcaacgcaggatcaatttccttgatcgcattatatatgggtaaaatcataaaaggaatttcgatgtaagttgctacaaaaataaaggcaaaattggtaaacaaaatatttaccggaccaattccaaatagatgcaagaagttatttactaatccactcttaccaaaaatcccaataaatgcataggcttttaaaagcaaattaatccaagttggcaaaattatcaaaagtaaccaaaattgttgattttttagtttagttaaaatataagctactggatatgatactaacaaagtaaatagagtaataagtaatgcataccaaaatgaatttagtgtcattctcaaaaaagtagcatttgtaaagaagttgctaaaattttctaaactaattgaaccattaccagttaatgaagtccaaaaaatcagcaataacggcagaacaacaaataagccaatccaaagactgtaaggtaataaaaagaaccaatgtttattcttcattatcatcctcaccttcgtatttttctaatcgtgcatcaaattcttcttcactttcaccaaatcgcataacatggatatcttctgggtcgaagaaaatgcctacttcttttccaacttcagttggattagttgaatgaattagccactcattttcatcagcatcatgagccttaatttcaaagtgatcacctaaaaatagctgactttcaactgtaactaataattttcccttatcaggttctacaatatccaagtcttctggtcttaaaaccacttcaactttttctctcggattgataccagcatcagcacattcaaaatgcttattaacaaactctacttcataatcttgaaccatccgtccaggaacaatattagaatctccaataaagcgtgctacaaaatcattaactggctcatcataaatatctactggtgtaccagattgttgaattttgccctcgtttaaaacgaagatttcatcactcattgctaaagcttcttcttgatcatgagtaacaaatataaaagtaattcccagcttcttttgaatagcccgcaattcaaactgcatttctttacgcagacgcttatctaaggcagacaaggattcatcgagtaatagaactttgggtttattaataattgcccgggcaatagcaaccctttgttgctgcccacccgacaattcagatatttcacgattagcatacccatctaggcgaacagtatgcaacgcctctttaacagcttgtttaatttcagattctggtcgtttttttagctttaaagcaaaagcaacattttcgtagacatctaaatgtggaaacaaggcataattttgaaagacggtatttaaatgtcttttagaagcatctaaattagtaatatcttgaccatcaaacaaaatttgaccactagtagcctctgtaaaacccgcaataattcttaaaatggttgtttttccactaccacttggaccaagcaaagaataaaatttacccgattcaatctctaagttaatatcttttaaagccacaaagccatcatcataacgcttagttacattctttaattcaatgatgttcacttactctccccctcaatatcacgaccaattattctaacttcagtatgcaaatcaattccgcgttgctctttaattgttttttgaatgtaatgaatcagatttaaataatctgtagctgttgccccgcccttgttaacaataaatcctgcatgcttagttgatacttgtgctccaccaatttgctttccttgcaaaccagccttaatcaacattgggccgacaaaatgacctgttggacgtttaaagacactcccacaagatggatattcaagtggttgcttatatgctcttaaggcattgagataattcatttcatccaaaatcttaagcttatcaccttgttccagcttaaagcgagcactaactacaatatctccagtttcctgaaccaatgaatggcgataactaaaatgcatttcatcatggctataatgcttaatttcacctgatctagttaaaacggtaacttcagaaattgcctgctcactttctccaccatatgctccagcattcataaagactgctccaccaacactaccaggaattccagcagcgaattctaaacctgatagtccatgattagcagcaaaaaaagctgttttaacaattgttgcaccagcttgtgcttcaactgtatctccatcaagcttaatttcattcatatctgttaaaataattactaaaccagcaatccctttatcagatatgattaaatttgatgcattaccaataacagtaatatctaagccatcttcatttgctgcagcaactagcatctgcagctgctccagattctttggaaaagccaaatattctgcctctccaccggttttagtaaaagtataccgactcaaaggtatctgctttgaaatattataattttgcttaattaaagaatctattttcatttaggagcctccaattttttcatcctttttattttaccgcaaagcgcgttattacgcagtagtatgctatactgaaattgtttacatttaaggagaattttaagatgaattttattgctatggactttgaaaccgccaatcgtcatcctgaaagtgcatgttcactagccttagtaatggttagaaacaacaaaatagcagatcgcttttatacggtaatcaatccacaaatgccttttgatgggcgcaacattagtgttcatcaaatcacacccagcgacgtaaaagatgctcctacaatggcagaagtttggcccaaaataaaagatttataccagccaggcatgcttgttgcggctcataacgccaaatttgatgccaatgttttaaaaatgtcattagccagatatgacatcgcagagccacattacctagtgattgataccttaaaaaccagtcgcttatttgaacctgatttgccaaatcataaacttaatactgtttctgaagcattggatgttgaactctggcatcaccataatgctttaagtgacagtgaagcttgtgccggaattttgattaaacaaaatgaaaaaatgggtgatgaagcaatcaagaatttaattgagcaaagataagataaaaagacgtaactgaacgctgtgttcaattacgtctttgtttatttattttctaaaatttgcgtttgcactacaaaatcttttccatctagacaaatcttaatatttttctctttcaataaatcgccatataaaattgcatacatctttccatgacaagaaaccatggtaatatagttagctttgaaaggaagttgccaaatttcatcaataactgcctgtactgacttcacctcacccaaataatttggtgaaagattcattgctttccatttcttttctaaaactggtaaaaattcaagatctttccccagtttattaaataaacaataacgatagtcaataccagtttgataaagttgcttagttacaaaatatctttgtttaaaatcagctaaactatcagttgctttaacttcccaagggagcgttgcatgcagatcaccaagcacattttgggcatcaaactccttgaacttacgaatattaagcgcaagtttacctgtaacttgactaagatgtctttcgctaataactgccttagctaaagtataaataccttgaatataagcagtatctacatcttttaccttggctgggaaagaaattacatgtagaagctttttatccttagataaatttaaattctcgcttgtttctgggatttcttcaattgcttttgctaaatcaacttgttcattttgcttttttaagaatttagaatatgaagcaaaagaactaactggaagtgctgaagctagttcatccccctgatataaattactaaacctcttttttaataaagtttcagaagcagcatctaaactatgatgagaaaaaattaatcttaattttgaagaagataaatcaactagggctataaaaattggtcgacctggcttttgatacattattttttctaaatcagaacgtttaatttcccctgttgcaaccaaaaatggaattgaagagtttaatattggcctaaactctaattttttgtcattaataaaccaagcatagtttaataaatcaactttattagctaattcagttaacaattgatagattctcctaatttctgtatagctggcttcttttaaatcaaactctaatatcgaaaaagaagttttaccttgtgagaaaagactctgtgctgttggagaggcaatgattggctcagatccatattcagcactaaaattatcaaacaataactttaaattatctaggtcaacttcactagcaaatgcacctttgacttcattattaccagttagctttttcacaactaattgatctagttgtgacagattattaatttggttaagttctgcatcctctatttcgattttaaatgcactttcaacttcaattataaaacggaccaaatctaatgaatccaaatcttttaaagctgatacattaaatttcgcaagcaatttttcaagttcctgctcaatatccttggtatcattacgcaagtattgctttttaagataatatttttcaatcatcttttttgcatcaatttttcgattataagtatatagaaactcaggtactcgaataattatcggatttaaataccgcggaagtttatgattaatttcagccgttttatcattgtcagctagataaaaaatataaattcgaccattttgatatttggcaactgcagattttactcccattacttcactcgcaatagttttcacttcaccaagttcaattctaataccattaacttgaacttgatcatccattcgctctaaaaataccaattcgccattatctaattgctcaacaatatcacctgttttatagtaattaattcctgcttcagaaataaacttttctcgccttttcacaggatctaacacatagccttgagttacacctttgccaccaatataaagttctcctttattcccctcttgattgactaacttaacaattgcaccagaaaaaggttttccaattggaacataattattttcattaagggtcacttcgtgataagtagcataaatcgttgtttcggttggtccatataagttaaagactcgacatccactcttcaaacttgctttaagttttttcgctaagtcaattggaaaagcttctccagcaaccattaaaaattttaattttttaaaaacatcgggccctccgattgttaacaaagcatcggcaaatgaaggagataaagataaatgagtaattttttcttcgttaatcaatttaggaattaagcgaatactttcagtttttgatggactagtaggcaaacagacaagctctgccccggtcaaaattggtgaaagaatctcagttaatgaaacatcaaaagaatatggtgttgagaaaaggaagcgcgtttcactattaacgtgaattaatggatataattcagataataaccatttaatattttcttcagtcaaaaaaactttcttcggtaccccagtactacctgatgttgcaagaatataagcatatttaggactagaagcttgataattaaagcttatatttttatctgggtcaaattcctcaacatttatattagtaaaatcataatcagttaccacaaaatcagttaccaaggaattccattccacttctttaacacgctttagtgcttcattaagagataaagctgaaacaagtggcattgggatttttcctgctttccagattcctaaaattacaggaagaacgaaacgcgtattttgtaagtaaaaaggaacaatgttttgtttattaaaatgcaataagccttgagcaagttgattacttagattttcaatctgtaaaaaagttaaatttccatctctggaacttatagctactttattaggttcttttcctagacgatttgttaattcttttaaaaaaatcattttaatcacctttcagttttatatttttttcttttaggatttagcaatgaatataaaggtcctatattagaaatcaagtatgcaaaactagctaaaaaagctaaatacaatttagattgcatagtattatgagatagtaattctacaattctattacttagccaataccgaatagttgttgttgcaatataactaaataaaaaaataatacctaactgccaatttcctagtaaaaacaaataaaatattatagctaaatataaagttggcaaaaaaagccatgcaaatgctcctctatattgattaatcaaatatgaaaaagcagaagtcctatcaatatgctttttgaccagatcagaatatatttttccattttcaaatagtgttttaaaccatgtggcattttgtttcattagtatttttaaatttttgggcgattctccatattccacagcaaaaataggataaatcttaacatcatggcttctaagaaaaaaactcaaataaatatcttcacaccagtaatctgttgtaaatcctcgtattttctgtaaataatctaaccttataaataagccatgaccaaccacatgatttctaagaaatttagaaaaaagaattccatttgtaaacccatttgtaaacccatttgtaaattcaaaattcgtttggaaaattgcaaagcctttcatcaaaggagataacgactttaaatttttaaaaaatgcagcatattcctgcataattagtggaaatgattttgtctgacataatttacacatatttattaaagtttgttttgtaatattgctatcagcgttgtaaacagcaaaatagctttttttatcgacatttttattgttttttattattgcctgcaaagcaaaatttaattgatgtgccatcattccagaatatgcaggatagttcaataattttacatttttgtattttgaagaagtagcaagtttcttttttaccacttcataagttgtatcatctgaatcaattaatttcttctctttattagttgttacaatcaataattgggctttaattttactttcctcaattgcttttacaaaattatcaattgtattactgataattctttgttccaataagcagggaataactatatatagtagtccatcaaattttttaaaattaatattatttatagaataatgttttatctttttaaaaattatcaatgatctaactatgtgccataaacattgcaaaaacatacacaatataattaatttaatgtagagattcacttatatcacgacctatcatcagtttaatagaaactgtcaaattttttgtgtaaatagatctttctcgtaaattgtttttttaacgttttatttattcaaaataggattctaaggtatcctggacttgaccaaagcctttgtgaattcggttgaagtagctggtcattgtagctcattgcttggatgccaataaaagtatcaagcgactgttcagtacgggaactccgctttaggcttagccttgcgcttaatgacgttattaaaggattcgatcatgttggtagagtaaattgaagccctgatctgcttaggataattataaaaaacaagcaggtctggctcgatgtctttcaggtttctaatgacacgattgtagctcttgttccatttggcataaaaagcatgcaatacatcaacagcagccgctttattggcttgctggtgaatctgcttgaattcgttcatgattgcctcgcgatcgtccacgcgtactttagcgcagatgttgcgcataacatggaccaagcagcgttggaaatgagcttgaggataggtctttgccagtgctgctttcatgccgacaacgccatctgaaaggaaaagctctacttgctttaaaccacgagatttcatgttctggagcaacgccgtccagacttcaatattctcactaggcgcaatgcagtagtcgataacttccttgtgaccattaggcttgatgccaatggcaatatatactgcttctcgttcaaaagtttctcgacgcaacggtatatacgttgtatcaagataaacacaaaagaacttatcgctcagcttacgcttgtgataagcctcaactttaggaatcatttgcttagagatattagacacttgagctggactataatgactgccatacattttttcgatcaaattagctatttctctagtgttacacctttagaataaagctttataaccatatcttctaagagatcagtatgttgtttatagtctggcagagtgtgttgatgaaacataccattgcgatctcgtggcacttgtacctcaattgatccaaactgggtatcaattttacggaaatacgcaccatttctagaattaccagtattccagccatttctagcatagggatcatatcctaaaaaggcagtcagttcagattctaacatgtcattaacagcttgttggatttcatgacgaagcaaatcattaattttatcttgattgaatagagcttgagttatatttttggtaaaatcattcatgaaggagttcttctttctgtatgttttttttgttcaaaccaatcatacgagaaaggaactcttttttctaatgttttaggaaattaaattaaggaataattcatccttacacaaactattttacggtctcgtttaatagtttcaatcacttgtttatatacttcttctttagacatattagaagtatccagaatcatcttattatttattttttcaaattcactctccagaaccctttcttgtttgaatcttgtaattggacttgtccaaatatttaaaagcttatgttttctattcttatttttctcttcagaaatctctaaatctgctttaagtaaaatcgataaatcaggttttgccaaatcaaatctagctatctttttttcatattcatgaaaaaatttttctgctatttcatatgtcccctgtattatggatgattgaaaagcattagccgttgcaagtatagaaaatgcagatttatcgattactacattttcccctttttgtgctaaaaaattggcatcatataacttttcaaattcaatatcaaataatagctcttgatttaaaacttcttgattagaattttcgggtacaaaaagaatgttatctccacaatcattcaatctattttctaaatatctaatggcttctggtataatttcgaagttggccttattttttaaactattacaaagagttgttttccccgaatttgatatcccttctatgagaattataattccacgactcatttttatatcactcctttaaaataaatgttataatttcattatctttaaatatattttaatttaaactataatttttttattttttattgtcaatctttatttcataaaggaggactaaaatgacaacaaaactatctcataccgaaaaaattaatactgttaaagttacttctagtaatgtaatttctaaatttggtgatatattatttgactacgtcaactctgtcttcttatcaagtgttgctaatggcggtctatggctttctttatatcagagtagtgaagtatttattagtgtaatttttaatttcttaggtggtgtattatctgatacaggtaaccggaaaaaaatcatctggcattgtgatttaataagtgggcttgtttgtattttactagcaattttcatccctcatgtttttttcatttatgcaatcattattattaacatcatattagcaattatttcctcttatcgaagtcctgcatataaggctgtttttcgtgaaattgttcaaaaggaacatcttaatcaagttaattcagtcctagaaattgctaaacaagttatccaaattactggtccaactggtgcattaatcattgcccactttttcggtaatcgttttgcactaatttttgatggaatttcttttattatctcaggtctcttaattcgtaaattaactattttatctgctccagttaagaaaaaaagctcaaaaaagactttcagtcaaattcgtgagggtttaaattatatttttcataatcgtgaaatattaattattattactttttcaagcatagtaaacttcgttattgctggatataatttaattcttcctttttcaacatatgctttttcagattctcatttaaaagcatatgcggtattattaacagctgaatccattggtggactactaggagcaactgcatcaaccttgataaaaaagacacctacaactaataaactactatttttgattttcttagatggcttagctttaatgcctagtgaaagaatctatcatttatcacattcaattattttagttgcaatttgtataagcctttttaacttctttctttcaatttttaatattcaatttatgacctttgtgcaagtaagaacagatatgaattatattggtcgtgtattcggaactattttttctgttgccattttatttatgccgataggtacctttttcttcaaatttgcttttaatttgcaaaatcctaataattactttgttttaggtagtttactaacttttatttcaattattaccattatcctaaatacaatttttaagtcaaaaaattaactaaaaaagacgtaactgaacgctgtgttcaattacgtctttttcttactcttcaaacttagctaatgtatcttcaagccaatctttagcttgctttccttgtgcgttaacctcaactactcgcttagttgaatcccaagaatcatcaacacgctttaaagttaactgcaaataatcgtctggcaagtcattcataataatttctggccattcaattactacaattccctgctcatttaaatagccatttaaatcaatacttgccaaatcgtcattttcaagacgatacatatccatatgaaaaagtggtaaacgtccctcacgatactctcttacaatcgtaaaagtcggacttttagctggacgtctaattcccaaactgcgagctaaaccttgtgtcattgtggttttaccggcacccaaatcaccatttaacaaaagtaagctaccaggtttggctacttttccaagactagcccctaatttttgcatttcttgagctgaattaatttctaatttcattattcttcatccaaactttgtgctgctgttaaaatagctgcttcataaacatcttgactactgcatccccgtgataggtcattaaccggtttagccaaacctgccaaaactggtccaattgcagtaaaatcacctaatctttgtgcaatcttatagccaatatttccagattgcaattctgggaaaataaagacattagcatgaccagcaacatttgaatcgggagcctttttggcaccaacacttgggacaaaggctgcatcaaattgcatttctccatcagcactaatttcaggatacttttctttaaaacttgcagctgcagcttgtactttacttaccatttcacccttagctgatcccatcgttgaaaaacttaaaaatgcaagttttggctctaatccaaccattttagctgtttgggccgcttgatatgcaatttctactaaagtatctgcatctgggtcaatattcatagcacaatcactaaagatatatctttggtcacccttttccatgataaattgaccacttactcgtttcatgccagctttagttttaataatcttaagagctggacgaacagtgtctgcagttgagtgagctgcacctgaaacacaaccatctgctaagccattataaacaagcatatttgcaaaataatttggatccaatacttggctacttgcttgttcttcactttctttacctttacgaagttcaaagtattgtttagcaaattcgccttttctagtatcagttttaggattaataatttcaatcccagttaaatcaagcttgtgatccttagctgtttcttttatttgagcttcatcacctaatacaagtggtttaataattccttcgctatttaacttaactgctgcagataagactctttcatcttcgccttcaggaagaacaattactttcttatgtccaacaatttttgcttttaattcatcaaaaatactcatacgtaagctcctttatttttctactttaacttctactggtaattgccaatcaattgcccgtttaccccattttgctaatgccgcattgcatcttgaaaaggggcgtgagccaaagaatccatatcgagctgaaaaaggactcgggtgggcggatttgataataacgtttttgctctcatcaattaaagggattttattctgagcaaatttcccccataatatgaaaactacttctccacgttcacttaaagctttaattgcttgatctgtaacttcttcccaaccttttccttgatgaccatttgcgtgtccataaggtacagttaacacggcattaagaagcaatacaccttgatctgcccatttcttcaaatacccatgctttactggaagacaaccaacatcatcatataattcctgataaatattttttaaagatggtggtaacgcaattcctggattaactgaaaaactcatccctgttgcttggcctggattgtgatatggatcctgtcctaaaataactaccttagtatctttaaaactagtcaatttaaaagctgtaaaaatatgatacatatctggataaatttgtttacttgcatattcttccttcaaaaaattatgcaatttttgataagatgcacttgaaaagaccggttctaacacctgatcccaatcatttccaataagttctttcatcgcaaaatcaactctttctttactttatatgttatcatgaaactaattagggagtctgtagttttaataatttttcaaaagcaggttcaaaaatgaaattaattttactttttaatcaacaaaaaaattatggacaaattcctgttgttgatcaaactgagaaaattcagttttttattcagggaaaactccataattcaaatcacacactttttctaactgatcttaaccataaagagattggtcgtttatatcaagatgggcgaaatcttttaaccagttacactattgatattattgattatgaattagctcaagttaagcaagtaactaatgttgaattacctatgtttttaactaaaaaaaattatctaataactggaagcacaaaaaaaggctcctatcaatttaggagcacttttaagataatggctagttgtgaaagtatggttatcgattctggtcttgccttagtttgtgatattaagagttatcaagatattccatatatcttattaataactggcttattcagtcaatggtcagctactcctcttgaactacctcagtttaagttcaataaccaactttcaaccaattgcaattaaaatttacatacgatatttgcgacgtaattcacgttcttgatcacgtttctttattgtttctcgcttatcgtattgcttctttccttgcccaatccccagcaaaatttttgcaaaacctttcttcaggtaaactttcagtggaatgatagccatcccctgttgcgcctgaacttcggctaatttgcgaatctcttttttatgtaaaagcaattggcgacgtcgtaagggatcatggttataaatatttccttgcttatattcactaatgtgaacattttccaaataagcattaccattataaatttgtacatagccatcacgtaattgaattcttctcgctcgtacagatttaatttcagtcccagttagtgcaatcccagcctcaattgtttctttaatgaaataatcatggctggcttttttattttgcgctaaaacattatttgcttcttttttcatatgacgctcctatttataacgtcttctacctttgttatctcttgaattacgagatctacggcctcgattattatctcgattacgacctgctctaccaaaacgattatctctacgtctaggacgtcccataccgcgatcattatgttctttcttaggcgcattaggatcataaatttcaaagtccaattgatgttgttctacattggcattaatcaaagttactttgagtggcataccaatcttaaattggcgatgagttcctcgtcctgtcaaagtcaaagtcttttcatcaaaattatagaaatcatctgtcaagttagaaatatgaattagcccttcaactgtatttggtaattggatgaacatcccaaaactagttactgaagaaatcacggcatcgaagtgttcaccaacatgatcggccataaattctgtcatctttaaatcatttacttcacgttcagtatcaatagattttctttcttgggtagatgtttgttctgcaacatctggtaaaattggtccaaaatgtttttgagtatcttctgacaagttggagtcagtatattcatgaatcatacggtgaaccattaaatcagaatatcttctaataggagaagtaaagtgggtataaaattcagcggcaattccgaagtgtcctaaaggctcgtcagaataatgggcttgcttaagagaacgaagcataaccatttgcacaacagcttcttcaggagttcctaaagttttagttaccactttttgcaaatcaattggtttaacatcatttggatcagccttaatatttagacccaatgcagatacgaattcaaagaagctctgaattctttcagcatctggagtttcgtgtacacggtaaaggaatggaacatgctttttaaaaaatgcttctgcgactgtttcattagccaataacatgaaggactcaatcatcttttcagctgtaccacgattgtgaagtacaatatctactggcttacctttatcatcgacaataatttttgcttctggttcttcaaaatcaattgccccacgattgtgtcgttgattatacaagacttcatgcaagtttgccatctctttcaacataggttgcagttttgcatacttttcatctaattcagatgctggcttggttaaagcttcatttaccttgttataggttaaacgaccatgtgagcgcattactgaagggtgaatgtcatatgcaactcgtttgccttctggggttatctccatatcacaagataagaccaaacgatctacaccttcattaattgaacaaatcccatttgaaagtctgaatggcagcatcggaataacacgatctaccaaataagttgaattacctctttgataagcttctttatctagtggagaattttctttaacatagtgtgccacatctgcaatatgaacacctaaatggtaatttccattaggtaacttccataaaactactgcatcgtcaaagtctttagaatcatcaccatcaatagtaactgcaggttgatctctaatatcaactcgattagttaattcagcttcttcaatatggtccggaatttcattggcctgcttcatagcatcttctggccattccgttctaatatcatgggccgccacgattgacatgatatcaacaccagggtcatttttattaccaatagtttctaaaatagccccctgcatattttctggcatatcctcagttggatactggctaattgaaaccttaaccatatcccccatttgtggagtaattccatcaactggtgtgtaaattttatagtttttaaatttcttattacttgaaattacataaccacaaaaaccactgagttttacctgaatatcagttaaaggatgaaattcaccaacaagtgtttcaacacctcgttccaaaatttcaaccactttaccttcaggacccttgccattccaaggattaccattagcaataatctttactctaacatggtcactatctaaggcaagtaatgtgttatcaggtccaacaaaaatatcatcagcattttcttcatcatcaattctgacaaagccaaagcctttttcattggccctaaaaacacctgtaacctcagtatcaacgctagctaattgatattctccattaccatctgtcacaatttgcttttcttgttctagaaaagttaatgccttaactaattccgcaaatttaacatgatctctgctagccattctttccagctgatttactctaaattttctttgcggattatgccgaaaaatttccaatattgtggctaaaactctttcatcttgagccattaatctacctctattcaatcataaaaaacgcctcccaaaataagatcgggaggctaaaaattacttagttgataaatatgcaaggacaaaagctaataagaagaaaaggactaataatacagaagttaccttttccataaatgcttcaaaaccccgctttttagtttgaccactaaatactgccccacctgacaaggcatttagggcatcttgttgcttttgcggttgcatcatcgtcgcaataacaatcaaaacagaaacgatgatgagaagcgtcataattatattgtacaatatgctgcctccattaataaaaaaataataatcactgttacaagtgtaccatagtcacgaaaagattgcgatattatgattgaaaaaaggtaaagagaaaagcctgcattaagcagacttttttcttctaattaataattaaattagaattgcttgtgtaagttgtagaatgagtgaatacccttgaattcagcagctgaatcaagttcttcttcaattctcattaattggttgtacttagcgatacggtcagttcttgacattgaaccagtcttgatttgacctgcgttagttgcaacaaccaagtcagcaatagtagtatcttcagtttcacctgaacggtgtgaaacgattgcagtgtagccagcttccttagccatttcaatagcttcgaaagtttcagtcaaggtaccgatttggttaaccttgattaagatagcgttagctacgcccatttggatacccttcttaaggtagctagtgttagttacgaataagtcgtcaccaacgatttgaaccttcttgctcaaacgatcagtgaagcccttccagtcgtcccattcgttttcgtccaatgggtcttcgattgagatgattgggtacttttcaactaagctttcaagtaatgaagtccattcttcagcagtgtattcacgaccatcagcaacagttacgtacttgtgggtttccttgttgtagaattctgaagcagcacagtccatagcgattgcaatgtcatcacctggcttgtagcctgcacgttggatagcttcaactaaaacttcaaatggttcttcgttgttagcaaggttaggtgcgaaaccaccttcgtcaccaacagcagttgagtctccgcgttccttaagtaaagcctttaatgcgtggaaagtttctgcacccattcttacagcttcgtgcattgacttagcacctacaggcataatcataaattcttggatatcaacgttgttgtcagcgtgcttaccaccgttgataacgttcatcataggagttggtaatacgtgagcgttaggaccaccaaggtattcgtaaagtggcatacctaattcgtcagcagctgcacgagcagcacccaaagatacacctaaaatagcgttagcaccaagacgacccttgtttggagtaccatcaaggtcaatcatagtttggtcgattaaacgttggtcagtaacgtctaaaccgataactgccttagcaatttcagtgttaacgttcttaacagcagttaaaacaccagtaccgttgaaacgtgacttatcaccatcacgtaattcaacagcttcgtgttcaccagttgaagcacctgatggaacaatagcacggccgaagccacctaattcagtgtaaacttcaacttcaacagtagggttaccacgtgagtcaaggacttcgcgtgcgtgaatatcagtaattacagacattggaaatctcctttatgtatttttgtaaaaattactttacttaattattataccaaactttagtcttggtaattaactaaacttaagaatgattcaacttcaagtgaagcaccaccaactaaaccaccatcaatgtttggcttagccattaattccttaacgtttgcaggctttacagaaccaccgtattgaattctaacattttcagcagtttcttcattgtaaagcttagcaatgctttcacgaatagttttacacatttcttcagcttgatcgcttgtagcagtcttaccagtaccaattgcccagattggttcataagcaataacaagtgatgaaacttgttcactagttaaaccatcaagagccttcttgatttgtgctactacaaattcttcttctttacctgcttcacgggtttcaagagattcaccacagcagattattggtaataaaccgtttctaaagattgctttagctttcttgttaatatcttcgtcagtttcgtggaagtagtctctacgttcactgtgaccaatgatgcagtacttaacgcccatttccttcaaaaccttaggtgaagtttcaccagtgaaggcaccttcatcttcaaagtagcagttttcagcagctactgacaagtttgaaccttcgctagccttgataagtgcatcaaggtcaactgcaggtgcagcaataactgattcaactttatttgagtcaggaagcttgtctttaacatttttaacaaattctgcagtttgtgcaggattcatatgtaacttccagttaccagcaataattggagtacgcattaataatgccctttctatttatcagaaatacattcaataccaggtaattccttaccttcaaggtattcaagtgatgcaccaccaccggtagaaatgtgggtaatcttaggtgcaatacctaattgcttagcagcagcagttgagtccccaccaccaatgatagtagttgcatctggtaagtcagccattgcacgaccaacttctaatgtaccttcggcaaagtttggcatttcgaaacaacccataggtccattccaaacaacagtctttgcgccttgtaaagtctttctgaataattcaacagtcttaggaccaatgtcaagccccatttcgttgtcaggaatgtcatcaccaacaacttcacgacttgcatcattagaaaattcagtagcagcaacgttatcaactggtaaaacaatcttaccgttagccttttctaacaattctttagcaagttctaccttatcagcttcaaataatgatttaccaatcttgtggccttgtgcagctaagaatgtgtaagccataccaccaccgattaagatgtggtctgatttaggaattaagttagtaataacgctaatcttgtctgaaacctttgcaccaccaagaatagttacaaatgggtgtacagggttagcaattgcgttacctaagaacttaatttctttttccattaagaaaccagctgcaaccttcttgccttctgccttcatagcagttgcaatacctacgtttgatgcatggcttctgtgagcagtaccaaatgcatcatttacgtaaaggtcacctaagcttgcccagtattcgccaagctttggatcgttctttgattcacgcttaccaaagtcgttgtcgatgtcttggaatctagtgttttccattactaaaacatcgccatcgttcattttggcaattgcatcttctacttctttaccttcgtttgaaggaacaaattcaacatctttttcaagtaattcgcctaaacgctttgcaactggtgcaagtgacaattctttcttgtcagcgtctgacttgatacgacctaagtggctaagtaaaattgccttaccaccgttgtcgatgatgtatttaatagttggcaatgcagcaacgattctgttgtcgtcaccaataacgccatctttaattgggacattaaagtcaacacgaactaaaactttcttacccttaacatcaaggtcagaaataattaatttagccattaaaaattacctccaatggttattaatcgaaaaaagacgaaggggagtaatcccctccgccttctcacacaacaaaataatcagttactaaatattagctattgattaaagagttgcaaacttcaataaagtacgaaccatttggcaagtgaatgagtattcgttgtcgtaccaagcaacagtcttaactaattgcttgtcgccagcagtagttacttcagtttgagttgggtcaaagattgaaccagcagtcataccaagaatgtcgcttgaaacgatttggtcatcgttgtatgcgaatgaagcactttcgtatttcttcattgctgcgttaacttcgtctgcagtaaccttcttgctcaatactgatactaattcagtttctgaaccgtcaacaactggaacacgttgtgcgtgaccttgtaacttaccgttcaattcaggaattacaagaccgatagcctttgcagcaccagttgagtgaggaatgatgttagctgatgaagtacgagcagcacggaagttaccgccacgaactggaccatctaataccatttgagttgaagtgaatgcgtggatagtagtcatagtaccaacttcaataccgaattccttgttcaatgctgaagccattggtgctaatgagttagtagtacatgaaccagctgaaacaatcttgtcatcagcagttaaagtatcatcgtttacgctgtaaacgatagtcttaaggtcgttacctgcaggtgcagaaattaagactctctttgcaccagcatcaaggtgagcttgtgacttagccttgctagtgtagaaaccagtacattcaagaacgaagtcaacgccatcgttcttaacccatggaaggttttgtgcttgtggttcagcgtatacacggtacttcttaccatcaactacgattgagtcttcagttgctgaaacttcgtggttgaaagtaccatgagttgagtcatacttaagaaggtgagccaaaagagctggagttgttaagtcgttaattgcaacaacttcaatatctgatgacttttcgcctaaatccataatacgacggaaagctaaacgaccaatacgaccgaaaccgttaataccaattttaactgtcatgtccaaaagtcctccttaggaactagtaataacattatttttattttaaagagagccttgttgcccctttaaaatcagatctgaggcaccttcgtctgtaatcagccatgtttgactcggtgcattatgcatataagagctaattgctttagccttagagtggcctccagcaaatgcaaatatatgaggtattttgctgagatcttcgaattgcaggccaattcgagggatccgctcaatcatcttaccattctcatcgaaaaaacacccaaaacattcggagacggcaccagttgctctaatcctcgataaagcaactgaatcatagccacggcgcttggccatatcctctgccaagccaataccgtgaattgcaacgtcacattgtgatatatcttgaagtacatcactaatagcgggatcacgaattaaagagcgataagcatctttagatacattctcaggtaagtataatgtcttatatttacctccggtagcttttgccatttcttgaacgatagtgctactttgtgtttccacgctttcacctaacgcaccacgacccggaacaaactccaattcgcgatttttactaagtgaacttgacaagacctttgatgccttagccaaggttgcaccacccaaaacagtaataatgctacttcctaatggtaataataaatcgagagctgagttgagcttctctcccattaggattgatacccgttcttgtaaatcagcatcacctggaacaataattgctctggcgattttcaacttcttagccaatttaatttcggcttgactagcattgaataaccgatttataagactagttgcatctttcagcgtttcctcacctttttctgtgaggtacattccaaatggcttaatttcaattaagcctaatttctttaaatattccgtctcagttctaactgttcgctcgctcataccgagttgctgtgcaacagctcttcgtccaacaggatatcttaaagaaatttgttcaagaacttgataacgctgtcgaaaaatttttaagacgtccggaaccaggttttgtagcaaggtaaaatccgtgtccatgacctgcctccttctcgtgggacattatctgaccatattgttgtcatcttttgacccaatatacttaaaaatataagagaaacgtgacttttgttcaattccaacatttccctttcgacgatttaagtataacaatgacaaaaattaatttcaagtattttagaaaaaataaatatttccgcttacaaaacttttatttcctattctgactttttttgctatactaattgttgatgtgattcgggcccttagtgtaatggatcgcacgtgagattccggttcttaaaatccgggttcgactcccggggggcccataattcagagcaataagctaataggcttattgctttttttattaccaatttcaaataaaaaaactagccaaacggctagtcttaattaatcatcaactttaacatctttatttactttctcggcatctttcaagtcttctccatcataacttgattttactccccaaatatagaaaagaattgaagcaatgataacaatcacaaaatcccatggatatttaaaagtattatttcctccgaaggcattacttcccatatatgaaattaccgaaataaaagctaagtaagttaataaccatatacttgatttaaattgttgcacaaaatttttagttttcttcttaaattgatagtaaaaataaattggcaagccaagcaatacaacaaaaataacttcaatagtagttggccacattgcccaatatattactaatccagttaaaacaaatgaaacaggagcaacccatttcaagtgaactgatttaaatggtcggttaaagttaggacgtaattttcgtaaactaatagccgcaacaggacctgtagcataggctacaaaagttgaaactgaaaccactgtggccaactcgctccaatttctgaaaaagaaaactaaagccatagctaaaaccaaatcccaaaccattgcataacgtggggtcttgtactttttattaactcgtcctaaaaatgcaggaacattacctgacttagtcatagccattaaagttctagcacttgttgcaacaaaagttacccctgtaccaaatggtgaaataaaggcatccatataaagtaaaacagaaagccaagtcaaccctaataaaattgcaatatctgcaaatggcgatgcaaaatcaactccatgccaacctgctttagctaacatgcttggctcaactgcacctataaaagctacttcaagtaacacataaataattgcagtaactgagagtgaaatccatactccacgaaaaatatttttatgaggcttttcaatttcaccagctaaattaatcactgtttgaaaagcatcataggacaaaataatcccggaaacagtaacagcttgaaaaatcccttttgtgccgtatggcataaaagtcgcagcactgcttccaaaattacttggatgaaaaccggctaaaatcaagaaaataattgttaaagaaggaatcaaaagcttaaagacagcaattaaacttgtaaagcgagtcaatagcttaacagagccaaagttaattaagctgaaaacaaacataaataaataaactgcccataagccttcattagtaatggttccattatggaaaaagcctctagtccagttagcccaactccatggccaactactcatatactggacgcaagcaacagcttcaattggaattaaagtaattaaagatacccagttagcccaagcactcaaaaagccaagtagctgcccatggctatattcagcaaaacgactcattcccccactttcggggaacatagtacccaattcaacataattaaaggcaatcagcatcataattgctgcaccaataatccatgaaatgattgaactaggacctgccacttgtgcagcactaccagctccaaaaagccagccagaaccaattaatgagcttaacgccagcataacgccagaaaataagctaatctggtttttcttcataaaaattctcctcattatttcgtatccttgtagaatacaatatttttcatataatttaaagtaattagttatcaaaaaatagcgtaattttgataaaaagtcttttttgctaagccctatttcttacaattagtcaattttatgctaaactatttttagaaaaatggaggtggaaaagttgtcagaagaaaagattgctgataaagctgcaaaaattatccgagctcatggcttaaagagaaccccgcaacgcttaaagattttaatttacctgatgacccaccataatcatccaaccgctgaaatgatttttaatgacatttctctatctgatgaaaaaacgggtattgcaacagtttataatactcttaacacttttgttgatttaggatttgtaatcgaaatcaataatggtagcgatggatcaactcattatgacttctttgctaaaccacattttcatgtcatctgtactaattgtggcaagattgcagatgttgaatatacaaattttgataaaatagaaagcaaaatgcgacaagaaactgaaaaacaaacaggctatatcacccgcagttcgcacattaagatttatggtttatgtcccgattgtcaaaaattaaaaaaataacttaaaaaagcacctttattgactaaatttaataaaggtgctttaattagcactgtattcaaatgagtgctaatttttattaggaggttaactaatgttagtacctacagttattgaacaaactgcacgtggtgaacgtgcatatgatatttactcacgtttattaaaagatcgtattatcatgcttagcggtgaaattaatgaccaaatggctaactcaatcatcgcacaattgcttttcttagatgcgcaagataatactaaggatatttccctatacattaattcaccaggtggtgtaattacttctggtttagcaattatggataccatgaactttatcaagtctgacgtatcaactattgcaatcggtatggcagcttcaatggcttccattcttttaactagtggtacaaagggtaagcgttttgccttacctaactctactgtgctcattcaccaaccacttggtggagctcaaggtcaacaaactgatattcaaattgctgctgaagaaattttaaagagcagaaagaaattaaacgaaatcttacatgaaacaactgggcaaccaattgaaaagattttgaaagatactgaacgtgataactacttaactgctcaagaagctaaggactacggcttgattgatgaaatcatgacaaacatgaagtagtaataaatttttaataatcaaaaagacagttcgcaatgcgaactgtctttttttattcaatctaccgacttaccacaaaaccacaaaatgagctctttctccattagcaagtgcaatcgtatctctcaagctaatctcaatcatatttctaactgaagttttagtaaagtatgctgagtgtggtgtcacaatcacatttggcatagctgctaatttcttatagtcagccggaatttgagcatcatcaactttcttaaagaaatagcttgattcatgagctaatgtatcaagtcctgctgcagcaatttcatgtttttcaagtgcttcaatcaaagcagctgtatcaactaattcacctctcgcagcattaattaaaattgcatcattcttcatttccgcaaattgttttttaccaatcatattctcagtactcttaagtaatggcgtatgaagtgaaataatatctgcttctttcaaaacagtatcaaaatcagcataagttaaatatggttcaacttctggattataaattacatcgtaagctaatactttagctcccatggcactaaagatttgagcaactgcactaccaatatgtccaactccaataagtccaatagtcttattataaatttcattactaattaaactatcaggattggtaaagtcacctttatccatattagccttaaattcgccaatcttgcggtttaaatacattgcttgagttacagccatttcagcaattgcccgtggtgaatatactggcacattggtaactgttaagtgatatttttttgctaaatcaaaatcaattgtattagttcccacaattcgaaggccaattgatttgataccataatcagctagtttcttataaacaatttcatcatctaagttgccaagaggtttaagcaaaaccccatcacaatctgcaacttgatcaacattttctgcagaaagtgactcatcaatcaattttaattcgcagccgaacttcttttccgtagctgcaactaattttctttcactttcacttggactaaaaactgcaattttcactataattacctgctttcaaaaaagaaaatacttgtttatatatttacttaaataataatactttagttagaaattactagttatcttgcttatttttcttttaaaagctagcagtaatacttcttctaccaatatgtaaattccaactgcaaggaaaaatgctaatacagctttagaatcagttaatggtaaaacaaacattaaaactaattggataaatactaaacccaatttacttattcctttttcaagcctcagcaaaatcgttgctataaaggttaaaagtacaaaaataaatagtctatagtttacaataactgtcccttgtaatgctaaaatgccaataaatgcacatgataaaagtgaaaaatacatcttgggtaagggctgtgaataagttttcaaaactaacttcaatagttctaaaactaaaattgcaattgcaaatattgtgctatttatttttaaaattaataaaagcgtgattactaaactaaaatcaaaataaataaacttatcttttgctctcgccatgaacacactgtataaaatccaaattccactaacaccactaacataattaaggttagttgcaaagagccccaataaaccaatcaaaaaggttaatacaaatgaactccattgaattacattagcatcaaaagtaacatgtttctgctttaaccaagctaaagaatataacaacaactgatctaaatgtagccatagcgcaattactaaaaagtataatactgctgttgttaccccttgtgtcataccaattaagaacctagttaccaagcttaaaattgctcctaaaagtaaaaacaccatacttttttctttaggtaaaaataaaactacaccaaaaccaattatgaaaagtccagcaactatgctcgcattaaatatattaagttttgaattaagaaatataatgctcaaagacatgattacaagagtaatcagttgaaaatgaaaagtaaataaattctgcttttggcgattgatgataattaacaataaaaggaatacaatttcaccaagttcatatttcaaattagaatgtattatgtgaataagtaacataagagatagcacattccaaatagtgaaagttaaaattcttgaactattcttaagtagcaagtaaacaatacatcctatagatacaagcgcaataaaataaaatggcaataccattacttgctgaattgcataatctagtagaagaccatatatgataaaaattaagctatttcttattgttactgttttcatagtataacctccaacaatcaagattgttttactacaggctttcatgccccacttatattatataatgcttcagaatattaaacttgcaataaacattctacaatcaaaaaagtcatgagaatttcttttctcatgacttttatccttcacgtaatttatccgcaatttctctaattttctgaaagcgatgattaactccagatttagaaattggaccatctggaatttgttcagctacttctttcaaagttaaatcgctgttttctaagcgaaatcttgccaatgtttccaatttttcaggaagttgttctaatcctaacttttcatcaattacctgaatatcttctacttgccttgctgcagcattagcagtcttttttaagttagcagtatcacaatttactagtcgatttactgaatttctcatgtcacgcattattcgtaaatcctcaaaagctagcattgcattaaaagcaccaacaatatgtaaaaaatcaccaatcttttcagcttctttaagataagttatatatccacttcttcgtttagtctttttactatttaagttaaaataatgattcattaaatatgaaatgtcgtcattatgagcttcatatactgaataaatttctaaatgatatcgactagtttcaggattattaacacttccactagctaaaaaagcacctcgaagatatgacattgctcgttgctcttcttcaagcacctttttaggcactccaattacaaagcctttttccgggtcaacaatttccaaatcagctaagatttcattaacttgcttattaagtcgaaccaaatattgattattcttctttaatttcatctttcgagaaacaattaataatggttcgatatcgtatgctaccttgattaacgtaaaaatccggcgagcaatcgctggattttcagttgtgatatctaaacttaattggtgatcatgtaagttcaaaattccattcatccgtaaaaaagctgacaattcagccttggcatgttccggatgaacttctaaattagttaattctttttttacttcacttgcataactaaccattattttcacctcgccggcaatgtgcttcaaaagcgagatcaataatttctttagctactttttcgccatcatgaaaaactaatccatgtctttggtcaataaagtcatcagtaataacgcggcaattctgttcgcgtagacccgcaaaatcactagaaactggctcaagatactcatcataatcagcaggattaaacttactcatatcgatttttgctccattaactagagcagtatcaatatagttgccacctaaatgtttattaattattcgaacatgatcagcatctgaaaagtgatcagtttctcccttttgagtcataatattacagatataaattacttccgccttagtttgccgaactgcttcacccaaattactaatcattaagttaggtaaaattgaagtgaacaaacttcccggccctaaaacaaccgcatcagcttgcataattgaagctaaaacaggtaaaactgcttcaggttctttatcatcattagtatcagttacccaaatacgcttaattcttttatctttactggtaatttctgtttcaccagcctcacgacttccatcgacgaattcagcatttaaagttaaaggttcattggaagcaggaaaaacatgaccatcaactttcatcattttagataatgattgtacagcatcgaaaatattcccatgcatttcattcaatgcggcaataatcaaattaccaatcgcatgaccagcaaagaaagaatctgaactatcaaaacgatattggaagatatcttttgattcttgaggcaagtcactcaaggcggccaatacatttcggatatcaccaggtggaacaacgttaatataatttctaattgctccagatgaaccaccatcatctgcaactgtaacaattgctgttatttcagcatttttttcttttaaggcatttaaaataactggtaagcctgttccaccaccaattactactaccttaggccggcggcccttaataactcggataatccggctttcagcataagccaaatgctccacctactttctgatataacggcttatttcacggtgtgaaatatcaactggatatttctttgataaatcacgtgccaactgttgtgcaattgagacgcttcggtgttgtccacctgtacaaccaattgcaatcgtcaatttttcttttccttctttgatataaccaggaattgtagtttcaattaaatctagcaactttttataaaagaccttggttacatctttatccataacataatcgaatactcgtttatcaagccctgtaaaaggcttcaaattaggaatgtaaaacggatttggcaaaaatctgacatccattacaatatcagcatcaattggcatcccatacttaaatccaaaactcatcacttcaactgtaaatggcttacgtccatgttcactaaagagttttgttaatttcgtctttaaatccttaggggtcaaactagaagtatcaataatgatattagagatatttttaattggtgataaaattgctcgttccttttgaataccatcaagtaaacgtccgcttcttgctaatggtggtaaacggcgcgtttctttatagcgagcaactaacacatcatcactagcgtctaagaataaaatcgttgcttgcgtattaccgttatcttctaaagagttaatctcattttctaagtccttgtaaaaacttttgactctcaagtcaattaaaactgcaactttattgaagtcatcagaagtattcattaagtcccaaaaacttcctaataaagtaggcggtaaattatcaacaacgaaataacctaaatcttctaatgaatgggcagccacagtttttcctgaaccactcatccctgtaacaattaacaattgtcttgtttcactagccataataacccctccttgtgaaaattatagcacaccgggtgtttcatttaataccaaaaaatttactacagtaaaagtagcaaattttttctaacttaatttatttttttgcttgtaatgttcgctctgtatctctttttaaaactggctttaaatacttaccagtccatgatttatcacattcaactacgtgttcaggtgtgccagttacaacaacctgacctccaccttcaccaccttctggacccaaatcaattaaccagtcagctgtcttgatcacatctaagttatgttcaattactaaaacagtattgccttggtcaactaaacgctgcaaaacaactaacaaacgcttaatatcatcaacatgtaaaccagttgttggttcatccaaaatatagaagttattacctgttgataacttttgaagttcacttgctaatttcattctttgagcttcaccaccagaaagagtagttgctgattgccctaatttaacgtaacctagccctacatcgacaattgtctgtaacttccgatgaatcttaggaatcttttcgaagaattcacatgcttctgaaattgtcatatcaagtacttgagcaatatttttatcatggtatgtaacttcaagagtttcagagttataacgacggccatgacaaacttcacaagggacatagacatcaggtaagaaattcatttcaatcttgattattccatccccatgacaggcctcacagcgacctcccttaacgttaaaggagaatctagccttggtatatccgcgaatcttagcttcattagtttgggcaaataaggctctaatatcatcgaaaacgcttgtataagtagctgggttagatcttggggtacgaccaattgggctttgatcaatatcaatgattttttcgatttctttatagcccgtaatcttagcaaatttccctggcttagcagaattatggttaagcttttgcgctaatgcccgttttaaaatggtattaactaaagttgacttacctgatccagaaacacctgtaaccacaacaaattttcctaatggaaaatcaacggtaatatcttttaagttatgttcgcaagctccagaaacagtaattttcttaccatttccttttcttctttcagttggtactggaataaactttttaccagaaagatattgaccagttaacgaattaggattagccatcacttcttcaggtgttccagctgccattaccttcccaccaaaactaccagcaccaggtcccatatcaattaaataatctgcttgcttcattgtttcatcatcgtgttcaacaacaattaaggaattgcccaagtcccgcattttcttcaatgaagcaatcaggcgatcattgtctctttgatgtaaaccaatagaaggttcatctaaaatatacattactccagataagttagaaccaatctgggtagctaaacgaattctctgagcttcaccacctgatagagttccagctgaacgtgataaggtcaaatagtctagtccaacatttaccaaaaacgttaagcgatcaataacttcttttaaaattggcttagcaatcatattttctgcttcagttaatttaacagatttgaagaaagtcgattctttaccaattggcaaatcgctaacttcactaatatcttggcccatcactttaacagctaaagctttttgattaagacgtttaccatgacaaactgcacaagttaattcagtcatgtatttacccattacttctcgcataaactgactcattgggtgatggtagcggcgatcaatattattcataaccccttcaaaggcttgagttgtatcattaaccccaaaatcgccttccaagtggaacttaattttcttgtctgagccatataaaacaagattcttttgacgttcagttaattttttaaatggcttatccatattaatgcgtaaactttggcaagcttgtgtcagcatcattttatagtagtcactattagcccaaggagcaattgccccctcatttaaggttttatctttatcagggacaactaaatcttcatcgacagctaatttcatccccaagccatcacaggcttcacaagctccaaatggcgcattgaatgaaaaaagtcttggttccatttcgccaacagtaaatccacacttagggcaggcataatcttcagagaagttcaaaacctgattgccaataacatcaacatccatatatccttcagaaagtcttagggcagattcaacagaatcagttaaccgacttttaattccatctttaacaatcaatcggtcaacaacaattgaaattgaatgttttttatttttatccaagttgaattcatcactaacttcatgcatttcaccatcaacaattaaacgcacaaacccggcacgagcaaccttcttaaaaacttcttggtacatcccacgcttttggcgaattacaggtgctaaaatttgaattttactgcgttcaggtaattctagtacccgcttaaccatctgatcaactgactgtctctcaattaaagttccatcattagggcaaattggatggcctactctcgcccataagagtcgtaagtaatcattaatttcagtaacagttccgacggttgatcgtggattatgtgatgtagttttttgatcgattgaaatagcaggatttaagccatcaattgagtcaacatctgccttatccatttgccctaaaaattgccgtgcatatgaagataaagactcaacataacgtctacgtccttcagcatataaagtatcaaaagcaagtgaactcttaccagaccccgataatccagttactaccactaatttatctttaggaattgttaagtcaatatcttttaggttatgttcacgcgctccatgaatttcaattttatctcttaccattaaaatccttccccttatgctttttcggtgtatgaactgaattttgtaattccatgattgcatcacgcaaattagcagctgcttcaaagtctaacttcttagcagctgcttgcatctgctcagtcaagttcttaatcatggtttgcttttgcttcttcgttaactcatcaaagttaagctcagcaaaactttctttctctttttcttctttaactggtttagtgattgaaataacatcacggattggtttaacaattgtcttaggaacaatgccatgttctttattaaaggcaatctgcttttcacgccgacggcgcgtttcatcaatagctatccgcattgaatcagtaatcttgtcagcatacataattactgttccatcactatttctagcggcacgccccatcgtctgaatcaaaggtctggttgaccgtaagaaaccttctttatcagcatctaaaatcgcaactaatgatacttcagggacgtcaatcccttcacgcaaaaggttaatcccaattaagacgtcaaaatcaccttttcgcaaatcatgcagaatctgcattcgttcaagtgttttaatatctgagtgcaagtaacgaaccttaattccaagatcttttaagtagtcagttaaatcttcagccattttcttggttaaagtagtcacaaaaactctttcatcccgatcaattcgcttatttatttccccaactaagtcatcaatctgaccctgaattggtcttacttcaatcttaggatcaagtaatccagttggccgaataatttgttcaacgattttacctgtgcgattaagttcataatctccaggagttgctgaaacataaaggatttgatttacatgcttttcaaattcttcaagtttaagtggacggttatctaaagcagatggtaagcgaaaaccataatcaattaaagtttcttttcgtttacggtcaccattatacatagcccgaatttccggcattgttgcatgagattcgtcaattaaaatcaaaaaatcgtctgggaagaaatcaagtaaagtatgaggtggctctcctgcctttctaccttcaattggggcagaatagttttcaattccattggtataacctacttcgctcatcatttccatatcataagtagttctttgcttaattctttgagcctctaataacttaccttctccttcaaattttttaacttgtaagtccatttcctgactaattcgcttaagtgcctgcttcatttgttcttcattagtcataaagtgcgtggctgggaaaagagatacttggtcacgttcaccaattacttcacctgttaaagaatcaacttcaacgatgcggtcaatttcatcaccgaaaaattctacacgataagcatgattactatttccagctgggaaaatttctacaatatctcctctaacgcgaaaacgaccacgttgaaagtcgatatcattgcgatcatactgaatatttaccaaatcacgcaataagacattacggtcatattcttgaccctcatgtaagcttaaaacgctggcagcatattctcttggatcccccaaaccataaatacaagaaacactggcaacaactacaacgtcattacgctccatcaaagcactagttgctcggtgccgcaattggtcaatttcatcgttaattgaagaatctttttcgatataagtatctgaacttggaacatatgcttcaggttgatagtagtcataatatgaaacaaagtattcaaccgcattattggggaaaaattctttaaattcaccatatagttgtcccaccagagttttattgtgagaaataactaatgtcggcttgtttaacttggcaataatattagccattgtaaaggtcttccctgtcccagtagccccctgcaaaatttgttctttagcaccagctttaaaaccagcagttaatttatcaattgcttggccttgatcaccagctggcttatatttagaaactaaatcaaactttcgattggtttgtcttttaatcatgaataatccctcgcaaaaaaaattggaccttaacagtccaattttatcattattcttattttactacttcgaacacgttttcgcaggtaataagcttactatttagtaaattttgcaattgcttcatggtaggccttgcatttttcttcagccttagcgtaagtttccgcatttgtaccaacataagccttgattactggttcagtacctgatggacgaagagcaacccaagtttcatcgtctaagaagtacttaagtacgtttgacttagggaaacctagcatatctttttcaccagcaggggtaatttctttagctaattcaaagtcttcaattttaattaccttgtgaccattaatttcttgaagttgttctttacgtaagttttccattaccttagccatccgcttttgaccgtcaagtcctggcatttcgattgccttagtaatttcacaacttgcaccatacttgttccagatttcttgtaagccatcaaagactgacatatttcttgaagcgtagtatgcagcaacttcaaagaacattaatgcaccttgcattgcatctttatcacggttaaaggtcttgaataagaaaccataactttcttcaaagcccatcaagaattgaccatcaccagtcttgtgtaaacggtcaatttcttcaccaatatacttaaaacctgttaaaacatacttagtttgaatgccaaatgattttgcaatcttgaatggtaaagcacttgaaacaacactagtgataatttcatatgaagaatcaagtttgccagaattcttcaaattagttaataagtagttagaaattaaagtagcaatttggttaccagttaaaacttggaaatcaccatttggagttctaacagctgctcccaaacggtcagcatctgggtcagttgcaacaataatgtctgcaccaaccttatcagctaccttaacaccttcatcaaagacttgacgatattctgggttaggcttaattgtagttggaaattctggatcaataattgcttgacttggaactacagtaaagttcttaaaaccaccttgtcggaaggcacggtcataaatcaccttacctgtaccatgaactggtgtgtaaacaatctttaacttatcagctgtttccttaattaaatcatggtttacattaattgtatctaaagcttcaaggtaagcttcatcaacatcttcaccaaccaattgtaaaatcttcttagctcttaattcttcgattgggcttactggaattgctaattggttttcaacttctaaagcagccttttcaacaacagctgcatgttcaggtggcatttgtccaccatcagcaccataaatcttgtaaccattgtattgcttagcattgtgtgaagcagttaccatgattccggcaaaagttcccaagtggcgaattgcaaatgacaattcaggtgttggtcttaaaccatcaaataagtaaaccttaatgccatggtgacccaagatttgagctgagagcttagcaaaatcttctgaatgataacgtgagtcaaaagaaattactacacccttttctttagcttcttgaccttctttttcaattaattgtgctaatccttcagttacacgtccaacagtaacaacattgatacggttagtacctggttcaagtaagccacgcattcctgctgtcccaaagttaatatctgtaccaaaggcatcatctacccaagctggatcttgacctaattcctttaattgtctttgtaaataatctggtaatttatcagcttttaaccaattttcgtatgcttgtctagcagtcataagtaactcctatcgttatataatttctataatttattaaataaattagtctattttattataccactttgtatttagctaaaaataccatagaaaaaaaagcctgctatttacagacttttttacaatcttattctaatcattcaaactttgaagataattataagcttcttgacctgcaatactgccatcaccaacagcatttgcaatttgtcgtaagtcttttgcacgaacatccccaagggcaaatacaccatctattgcagtctgcattttttcattagtaataatccagccatgctcatcagtaattgccaaatctttaaataaattagtttgtggttcaacacccacataaataaagattccgctcgcactaacttccttatgctcacctgttttcttatcaagatacttaacagtagtaactttttgatcatcaccactaatttcttcagtttgagcattccaaataaagttcatcttcttattagcaaaggctctcttttgtaatacaggctgcgcacgcaagctatcacgtctgtgaataacagtaacagatttagcaatattggctaaatatagtccttcttcaattgctgaatcaccaccgccaacaactactacatcttcatccttaaaaaatgcagcatcacaaacggcacaataagaaacgccacgacccgaatattcttcttcaccaggtacacctaaatgcttatgttcagcaccagtagcaataattacggctttagcttcatattctgcatcactagtttttacaagctttattttatttgaaaaatctacactagttacatcgccatacttaaactctggaccaaatttcattgcagattgatacatcttttcacttaattcaggcccttgaatttccataaacccaggataattgtcgattgcaccagtgttattcatttgaccaccataaattccgcgatctaaaattaatacacttaaattagctcttgctgcataaagggctgcagttaagccaccaggtccagcacctataataataatatcgtattgctttgtcattttatgcctccacttactttttataagtataattatactctagaggaaacttttagcaattaatctgcttaccagcgaacttcgcttgtcttttcacggcacatcattgcacgaatctcttcatcaatatctgcgccttcatataagactttataaatcgcttcggaaattggcatatcaattccatctttttggcagatttcatgcactgctttagctgtaacagcaccttcaacaacttggcccatattttctaaaacgtcttctaacttttgaccttcgccaagtgctttacctgctcgccaatttcttgaattaactgaagtacaagttactattaaatcaccaattccagataagccgctaaaagtccatggctgtgctccaaaagaaactcctaatctcattatttctgctaaaccacgagtcattaatgcagcttttgcattatcaccatattttttacctactaacatccctgcagcaatggcaattacattcttaacagcaccaccaatttcaaccccaatcaggtcattactagtataaaagcgcatatagtcattagaaaaaatttcttgtactttttctgcattttcataattagttgaagcacaagtaatcgctgtaatatccttttgggctacattttcagcatgacttggcccagaaattgcgacaattttttcttcatgatctggataaatttcttcagttaaaatttgcgaaattaactttttacttccaggttcaattcccttagttgctgcaacaattaatggctgagtttgtgtttcagtcattactttttttacattttgagcaacttctctaattgctttagtaggaacaacgaataatactaattcgctatctttaacagcttcttttaaatcagtagttgccaatactcgtttatttaatgcccaatctttcatgtaatggatattagtatgtttttcattaatttcatcacaaaccgtttggcgattcccatataatagaacttgattattttcatcattatcagccaacatggatgctaatacactgccccatgaaccgctacctaaaactgcaatttttctcataactacctctcatacggaaattttaatccactaccatctaagtaccaggcaacattaccttgtttgcgacgataaatgacaaagataattgctgcaacaaataaaaccaaacttaaagcttgtgatactctaattacgttaaaaatgtataaactatctgttctcatcccttcgacgaagaatcgaaccattgaataccaaataatataactggcaaagacttcccctcgcttgaagaaatttttcttgtgccggagtgccaagattagaattaagccaattaaattaaaaaatgactcatataaaaatgttggctgataataatgaccaccaatattcatttgcttaataataaattgaggtaaatggagactctgcaaaaaagctaaactcgtttgagcaccatgagcttcctgattcataaaattgccccaacggcctaaaatttgggccgccaaaactccgggcgtaataatatcaagcatcaataatggtggtaacattcgatttctacaaaaaataagtaaaactgctagtccggctaataagccaccatatatcgcaattccgccattccaaattgcaataatttggtcaggatgttgcgaaaagtatccccactcgaaaactacataatacgttctagctcctataaagccaattggtacagcccaaagcaacaaatcaatgaaatcatcactcattatttgcctttttttaccttcaataattgccattgtagtagcaatcaaaactccagttgccataaaaattccataccacttaacacttaagtttccaagttggaaagcgactggattcagtgctaaaaacaaatcagttcctccattctagttattatttttttcattttctgcaattaattttgctaattgttgttggaaagtgacacttgcatcaaaacccatttgcttagcacgaaagtttagagcagcaatttcaataatgatctctaaattacgtcccaccttaactgggatagtaacttgaggaacttcaatattgcaaatttcacgagtatcttggtcaaaacctagacgatcataattagccttgggatcccaattttccaacttaattaccaatttaatttctgtatggtctttaactgctcctacaccaaacatatctttaatatcaattatcccaataccacggatttccattaaatgattcaaaattttaggagcttcaccaactaccgtatcatgatctcgttggtacacatcaacacgatcatctgcaatcaaacgatgtccacgttgaattaaggccaaggcagtttcactcttaccaacaccacttgcaccggtaattaaaactcccatcccgttaatttcgactaatacaccatgaatgctagttctttgggccaagtgttctcgcaaatattgcgttaacacactcataatataagttgttgattcagatgtagttaaaatcggtattccatttctagctgcagcctccgttaattccttgggaactggtaaactacgtgaaatcaaaaaacaaggtgtatcaagcgttgccattttattgaaaacatgaagacgtgtttcatgatcaagcattgccgcataagaaatctcagttcttccaagcaactgaattctttttgaaggataaaagtcaaaatatccagttaattcaagacctggtcgataaatatctgagacagttactgcccgatttttaattaattcttttccttgaaatacatgtaggacattattatcttcaaataactctgttaattcaaccttatcagccataatattaacctctatttatcattaacatcttctgttgttacatcacgagctggtttgcgatgatgtccttccgtttctttagttgtattttttccataagaaacaaagtcatcccaactcattttataatcttcatccatttctttactaatttcatggcgaattttacgctttaagaaataaatatataaccaaattaatcctgcaataatcagaataaacggtaagataagaatgaatagcttcaatagagcgaataaaacacatacaataattgctaaaattaatactacaactaaaaattcaataaatcccataatattcaccttctattctggattttcttggcttaatctccattgtaagaaagaatagatcaaattatcaagcttgccatccataacaccatttacatcactagtttcaaaattagttcgatgatctttaaccatactatatggatggaagacgtatgatctaatttgagacccccatgcaatatcttgttggacaccttttaatttttctttttcttttcgcttcttttcttcttcaagttggaacagtttagcacgtaaagcgttcatagctgtttctttattttgaaattgggagcgttgagcttgtgaagtagtcacgattcctgtaggtaagtgtgttattctaaccgcactagaagttttattaatatgttgtcctccggcaccacttgacctaaaaacatcaattcttaaatctgctgggttaatatctacttcaatgctgtcatcaatttcaggaataacttcaacacttgcaaaagatgtatgtcgccttttagctgcatcaaagggtgaaattctaactaagcggtgaacgcccatttctccctttagcaatccataagcattagttcctttaattaagacacttacacttttcactcctgcttcatcaccaggctcgtaatcatcaatttcgaaagtaaaaccatgagcttcactaaagcgttgatacattctcataagcatttgcgcccaatccattgcttctgttccaccagctcctgggtggatttccattaaagcgttattggtatcatatttccctgagagaagtaagtttaattcatattgatgaaaactatcttttaagctttccaaatcagattctacttcagcttgtaagtcagtatcagattcttcttttaacaactctaatgcagcttcttcatcagaaaaagcttgtgccaaatcattaaaatgatctcgtttctcttttaatttatttgtagcactaattaatttttgggcagattcttgattattccaaaagtctggatctgccatcttttcttcattaattgcaatgctttcatttaaagcatcaaagtcaaagagacctcctgaaatgatttaacttaacacgtaattcatcaagtacagccgaaatctcactaatttccattttattttctcctttaagcaaaaaagaggaagcttttgcctcctcttttattatcaactatcttgcaatattttgtctaatttgagccttcataaataagcgagtagcatcaaattcaatgttggcaaccatttcttcaaacattctataaccagcatcttgatattcaactaatggattaagttgaccatatccacgtaagccaattgattgacgtaattgatccatagcatcaatatgatctgtccagcgatcatcaacaacccgtaggataaccaccttttcaaattcaagcatttgactaggatcagataaagtttcttctttatctttataattttcttctgctaaattataaagcttttctttaagctcatcagcagatttaatattcttcaaatcaatcttatcagcaacttcttcattagtaagacttgaaacaataaagtcacgtaatgaatcaattcgccaatcctttttatcgccttgagtatacaaatcaacttgatgagaaatagtccgtttaatcattggcatcaagacattcttaagtgatttatcttcttcaatcacttgcattctttcaccataaatgatttcacgttgggttctcataacatcatcgtattgcaaagtttgtttacgagtatcgtagttgttaccttcaacacgcttttgagctgattcaacttgacgagttatcattctactttcgataactttgtcatcatcattatcagaaattcgatctaagaatacttttacgcgatctccgccaaatctcttcatcaagtcatcttcaagtgataaataaaagcgtgaataacctgggtcaccttgacgtcctgaacgtccacgaagctgattatcaattctacgtgattcgtgtctttcagtaccaataactgctaatccaccaagttcacgaacaccaggcccaagcttaatgtcagtaccacgtccagccatgttagtagcaattgtaactgctcctctttgaccagctttcatgataatttccgcttctttagcatggtttttggcattcaaaactgcatgaggaatattttcagcatcaagcattttactcaaacgttctgaattttcaattgcaacagtacccaccaaaactggctgtcccttagcatggcgctttttaatttcttcaacaaccgccttgaacttagcgtcaagagttggataaagaatatctggcatatcctttctttgaataggacggttagttggaattgtgataacttgcatgttataaatttcacgaaattcttcttcttccgtcttagcagtaccagtcatcccagataatttcttgtacattctaaagaagttctggtaagtaattgtcgcttgagtcttagattcttcttgaattttaactccttctttagcttcaattgcttggtgcaaaccatctgaatagcgacgtccttgcattacacgtccagtaaatgagtcgacaattaggacttccccatcttggacaacataatcaatatctttaagcatgatgtaattagcacgcaaagcttgatcaatatgatgaaccaaaacttggttttcaacatcgtataagtttttaagaccgaaatgctcacatgccttagcaattccttgacgagttaatgaaatagtcttagttggccagtcaatcttatagtcaccataatccttatcatcatcaacatcatcatcgctcttgtcttcagttaaggtcttaacaaagcggtctgctctaatgtattcacctgtagcttgttgggcttcaccagaaataatcaatggtgttctagcttcatcgattaaaattgagtcaacttcgtcgataattgcataattaagtggtctttgaaccatttgttctttataaacaaccatgttgtcacgcaaataatcaaagcctagttctgcattagttgagtatgtaacatcacaattatatgcggcacgcttttcatctggtgatttttcattcagatttaagccaacagttaaacctaaccagcgatataactgccccatttcttcttcgtcacgtccagacaagtattcattaacagtaactacgtgaacacccttgccagtcaatgcgttaagataaactggcatagtagctgtcaaagtcttaccttcaccagtcatcatttctgaaatgttaccaaagtgtagtgaaataccaccgataatttgaactagatatggatatagtcctaaaactctcttagccccttcacgacaaaccgcaaaagcttctggaagtaaatcgtctaagctttcaccatcttctagtctctttttaaattcaggagttttagcttgtaactgagcgtcacttagtttggacatttcatcagcataaccttcaaccttatcagctaatttctcaaattttttaagttctcgtttatcactatcgtatagtttttttaaaatatttaccattaaatcggtccctaaaatctaatttaaagtctaaaatacaaatgatattttaccatgttattaaaaaaaagaaaaataactaacacaaaagactccttgagtttaaccccaaggagtcccaaaaaaatttaataattattattcattagtttcaattaagccataacggccatcatttctacgatatacaacactagtaccattagtttcagcatcttgaaatacgaagaaatcatgttcaagcatatccatttgtaagattgcttcttctggatccattggctttaaacttactcgcttattacgaacaatatcaaattcgctagtaggcttttcttcttcagctggagtttcaatgaaaaagtctttaacacctttttcacgacctttacggttaacacgtgtcttgtactttctaatttgacgttcaagtttatcagaaacaaaatcaatgctccgatacatatcatcagaagtttcttcagctctcaagactaagtatgggaggggaatcgttacttcaaccttagcatcatggttcttgtaaactttcaagttaacgtgtgcaataacatctgaagttaattcaaaatatttttcaagcttctctaaacgcttttcaacatagcttctcaaagcttcagttacttcgatattttcaccacgtacattgtactttaacataaaagattctcctttcaaccgctatgcggtttttctttacacctatattataccaaaaatgtaagcacttgcacggcctttatcgactaattgtaaaactttctatgtgtatatctgggaatacttgccaaatcgcatctcttgcatgatacaaagttcttccagtcgtataaatatcatccagtagtaatacttttccagatattcttatctgctgccctactgctttttcgagataaaagctttgtggtgttgctagacgctgctggcgattcaattcaccttggcttatatttaaatctctttttttcaaaattggacataatggcaccagacctttaaaaagctcgtaaatcgtgtcaaaccctcgctttttgatatgactttcagaggtgggaatggggatatagtaatcaaagccttgtggcattttcgattgaattaatgctcctaatgccttgcctacttggtagtccccatatcttttatataacctcattgcattatgaaattgcacattatatgcatagattgcatgattctttaataaaacttgatattttttctgccaagcctgacaatccttacatattttttgtgctcctgctttttgacagtattgacatcccttttctaaataagaaaatgaattttgacaatcagaacaaagaatatccaagctctcagaaagtggatttagcaattcattaaaatttagagctggcatgaatttatttccacaaagataacatttcatcggttcatcctcttaatttcagcaactgcctgtcgtattggaaaagtatatttgtgataacaaaataaaactaaaccattttgatcgtcactacttcgtccaactctgcctgcaatttgaattagtgatgccctagtataaattcgatcatcagctgctacaataattacccaaacatgtttaaaagttactccacgctctaaaatagtcgtagtaattaaaatatctatcttgctatctctaaattcctgtactttatcaatccgtgcctcatcagcggcgtgaacacctttaataacaacacctttaagctcatgacaggattgcaaagcttctaagtaaacaggtatttcacttattttggggacaaatagtaaaagtggatgtccagcctttatgacggagattatttctttgagtaaattcttatttaattgcatctttttcaaaaaaggctttaaaaacaacttctcctttggaactggtaaaagtccaccatgaaagcgtctgtttaatagcgaaacagtaatttctttatgcttaatttgctcaattagatcatctggtggagttgctgttaaatatagcttcattccatcggttttaactgcattatcagccccaaaatgtaacattggacttggtgcataagggaaagaatctacttcatcaattattaacaaatcaaaagcatgataaaattttaataattgatgtgttgtacaaataattaattgttcttcttcataatccttatattcccgaccatgatattttccaattttcaaattagaaaaagcactactaattctgggaaataattcattaactacatcaattcttggagttgctatacaggctcttagcccggcttctaagcataatttaagacatgcaaataacatttcagttttaccggctcctgttactgcatgaactaaataatcctgacgtttattaaacgcatcacaaatttcctgggataccttagcttgtctagtagttagttcccctgaccaagttaacaaatcaccttgtttaggaaattttttattacttaaatctctaattaaataatctttttcacttactcttcctaatccaatgcattcacgacaataaaggatttcctcagcgatttttgtatcacaataacttccacatctttgacatataccatcaattattccagcgattttttcacaattagaaaatatgctagaatcatcttgactgataatccattgtcttcctgcaagtgaggtaagattttccataaattttcctccctaaattaaattacccaagaaaggagaatttttttgtcagaaaaagaaaattttttaaccattaaagaagcagggcaaaacgaattaataattaaaaaaagtcgttttattgcaagtttcgctagaactgatactaaagaaaaggccgaagcttttatcaaagaagtatccaaaaaatatcatgatgccactcacaatacctacgcatatacaattggcttaaatgatgagcaagttaaggcaagcgataatggtgagcctcaaggaactgccggagttgttgaattaaaggccttgcaattaatgaaactaaaaaatgttactgttgtagtaaccagatattttggtggaataaagctcggagcaggtggattgataagagcatactccaatagcgtaactgaagctgcaaaagctattggtgttgtaaaaagagtattacaaaaagaactatcattttcgattccttataatcgcttagatgaaataaatcattatctagaagaaaatgatgtttttgtttctaatcgtaaatacggaactgacgtaacttttactctatttgtagaagataaagatattaaaccactagaagctgaccttactaatttgttaaatggacaagttaccttaaaagaaattggtcaacgctataacgaaattttacttaaagaagtcaattatcatgaacaataaaaaagctggagaaaactccagcttttttagtcttaaaaattaatcgttatctttatcttcttttgtttttcgttttaattgattaggcttttcaccaccaaggtgccaaacttcaacggtaggatcacttcttcgtgtactgttaatcattttctgaatcaaattaagtaatggatgatatttatcacctaaaagcccgaccgattcaacaaaaaactctaaggcaactaataaacctagaattaaaggccagattccccaagatggtgacagtaaaaataataatgaaataaatgaaaagactagtgaaatcccataaatgcatagtactgcttgtctatgactaagtcccattctcattaattggtgatgcaaatgatgtttatcagcttgtgaaattggcttatggtttaattttctacgaatcattgcataaacagtatcagtaatcggtacccctaagataataatcggtacaattaaagaaataaaggttacattctttaacccctttaatgacaagattgcaatcataaagccaatataaagtgctccagtatcacctaaaaagattttagcggggtggaaattatacggtagaaagcctaataaagccgctgccaaaataaagcaagcaattggaatatataattctttagtgtgaagaaagaagtaaccaacaacacccattgttgataatgaaattagtgaaacccctgtagccaaaccatctaacccatcaatcaagttaactgcattagttaaggctaaaatccaaaaaatggtaattggcaggctccaccaccccaaattaataacctgtttggaaaacggcaaaataatttctttcatctttattccagctaggaaataaataatcaatgctgcaataaattgccctgctagcttttgcttgggttttaactctaaaatatcatcaattaagcctgttaaaatcattacactagaagcaagcaagattgaaaaagcttcatgagtgggaaattgctcccttaataaaataaatatcccaatgttgaatgtcacaaaaatacccaatcccccaattgtaggcatcggctttttattaacacgacgagcattaggattatcaactgctcctagaacaaaggctaatcttctaataaatggcgttacagccgtttgaataattactaagaagaataattttacaataattaaaaacatgtttttctaaactttctgctaatatctagcgtttattatacaagttgtgaaaaattagtacaaatacaaaaaggacttatttgcacaaataagtcctttttttggttatttagcaatcgccaccgcacgtttctcacgaattacggttactttgatattaccagggtattccatttccttttcaatttggtttcgaatatctctagctaaaattgtcgtccgatcgtcagaaattttatctggttcaaccataactctaatctcacgaccagcttgaattgcaaatgcttggctaacgccttgataaccagaagcaattgattctaattgagtaagtcttctaatataattttctaatgactcacttcttgcacctggtcttgctgaagatatagtatcagcagcaacaactagctctgcaataaacgataatttaggcacatcaccatggtgagctgcaattgcattaactacaatatcagattcatggtacttacgtgctaattcaacaccgatttctacgtgggaaccttcaatatcgtggtcgatagccttaccaatatcgtgtaataatcccgcgcgaaccgctaatctttcatctaaaccaagttcagccgccatagttcctgttaacttaccaacttcaattgagtgagcaagaacattttggccataagaagtccgatacttaagtcgacctaaaacttttactaattcaggatgcatcttatgaatacctaattctattaatgcaccttcaccagcttcatagatatcatcattgacctctttacgagctttatcaaccatctcttcaattcttgctggatgaatacgcccatccttaattaggcgttccattgctcttttggcaatttctcgtctaattgggtcaaatccactcaaagttacaacttttggtgtatcgtcaataattaaatcaacacctgttaaggcttcaaaggaacgaatattacgaccttcacgaccaataattcttcccttcatttcctcatttggtagctcgacaactgatacagttgtttcagcaactgtatcagcagcactactttgaattgcatctaccaatatttgtcgagcaaaacgatcagccttagcttgagcttgctcattactatttcttattaattccgcacgctcgctatcaagttgattacttaaatcagctaaaattatttttttagcatcttccttactcaattcagctacttcatatagcttcttctgccgttgagccagtaaatcatctgcttcagtttgcttttgagtaaggtcggcttctctttgctctaactgattcttagtttgtgtgagttgagcatcttttttactcaaatccttttctttctcttgaatggcatcttctttttgctgcaaacgagcatcccgatgactgagctcaattctttgtttactcaaatcattttcggtttgctcacgataagctctaatttcttctttagcttctaaaatttgagcttttttattattttctgcttcttggcgaactgtctttgcagtctgcttggctacttcaacttccgccttaattgcatctaacttagtatgggcattttcaagcaaatgttgtgcatcattacgtgcattttctgcttgtttttcccaatgcaactttctaattaaataaccaataccataaccaattaaaagtgaaacaatagcgattagcacaggaataaaatctgttttcatcattatcactatcgccctttttaagaattatacacacaaattaatgataaattttcctataaaatatgtcaacaaaagtaaaaagaccttagttaaaaaccaaggtctaaatcgatttcttcaggcttactttttactagctttgtcgctacttttctcatcctgatcaattttttcttttacttttgctggatcttctttttcttcaagtgacttggcatcaattccatatgcttcacgaactttggtcataatttcagaatagatatctggatgatcttccaaatactgcttagcattttcccgaccttgaccaattttttcatcattatatgaataccatgatccagccttatcgacaatgtctttttcaacggccatatccagtaattcaccagattgggatattcctttaccatacatgatatccacttcagcaaccttaaaaggtggggcaaccttgttcttaactactttaatttttacacggttacctacaacatcacttgattgcttaatctgttccgcacgacgaacttcaagtctaatagttgaataaaacttaagtgctcgtccaccaggtgttgtctctgggttaccaaacataacacctactttttcacgaatctggttgataaagagtgcaatagtcttagtcttattaatattaccagataatttacgtaaagcttgactcattaaccgagcttgcaaaccaacatgtgaatctcccatttcaccatcaatttcagctcttggcactaaggcagcaacggagtcaacaaccaaaatatctattgctccactggcaatcaatgtgtcagcaatttgtaaaccttcttcaccggtattaggttgagataagataagtgaatcaatatcaacgcctaaagcttctgcataagctggatccatagcattttccgcatcaatatatgcagcagttccgccacgcttttgaacttcagcaactgcatgcaaagcgaccgtcgtcttaccagatgattctggtccatatacttcaataattcgaccacgaggatatccacccactccaatagctgcatcaagagctaaagagcctgttggaatagttgaaatctgtgtatcaaccttttctcccatgcgcattactgcacctttaccgaagtttttctcaatcttttttaacgctgcatctaaagcagcttgtttctcatctttagccaaagtatttcctcctcaagctagttactagttaattatacttgctatctagttacaattgcaagcaaaaaacgaactagcgttcatttatttacttattataatttccagccattaattaaataccctgttattccttgatatttttttatttaataaaaaaaagccttacggcttttaaattataattcacctttaaagacatctcttgattggtagaaatagtcccaaccagagtaaattgtgaatatcaaacaaatgtagagcaaaatcgtaccaataaagaaaatatctcctaataataagaaaataattgccaacatctgtgttacagttttaatcttaccaggcattttagctgctaacacttcaccatcattttcaactaaaattaaacgtaaacctgtaacagctaattctcgacaaacgataattgctacaatccatgctgatgctttagccatacttactaaaaaaatgaaagcagtcattactaacattttatctgctaatggatcagcaaattttccaaaattagttactaatcctcttgctctagcaatgtgcccatctaaataatcagtatatgatgcccctgcaaaaattattgcggccaaaatttgactaaaagggatcttaacattagcaaattctaaattacctactgggaaatttagaattaatactaacataaaaacaggaattaaaataattctaaaaacagttaaacgatttggtaaattcattctttaattattgtcccccgttatcttgccctgcatcattaccattaccggtattaccagtactttgtgtagttgtattttgactggtttgattggtagtagtttgattagttgttgtacgactagaacttacctgacttgattgtctataagtgtttgaagaactagttgcaacactactactttgtgaagaagtattagtggttgcagattgagttgctgcagaacttgatgatgaagaaacctttccaatagttaagcgcaagttcaaacttgaaccagatgctgtataaggaactttcttgccaccaacagtaactttagtatctgtatcattagataagtaaattgtcacagatttagcagattctggaagtttcacagtatgcttactatcagatgagatagtacctttccactttgtttcgccatcaattgtaactgaagcagaaagatcattggtacctgcgtgaattactaaattacggttgtttttaagaccagtaacttgatatgagccatatcctaaacgctttatttttacatgactcttttcagttgatgatgacttttctgaagaagatgaactatcagattgtgatgaaactgttactgaatcacctgcatcagatgcttgttgtgaagagcctctaaatagagatgtaattagtacataaattattacaattactattacaactcctgcccctaaaataatacgtggcatttgatttttaagcataccttttttactattagtggtcttttttacttcttcagtcttattatcgattgaattttcaacatattcatcactattagtttctggtacatcttgatggtattcagccaaaagttctttaccatctaaaccaacaacttgtgcatattgtctaataaatgcacggacataaaaatcaccaggaagcttgtcaaagtcgctattttcaatagcagtcaaatatctactttgaattttggttgttttttcaacatcggcaatagacaagcccattgcttctctagcactgcgtagtttttctccgatattagccataataacctcttgttctaaaaaattaacaaattgagtataccacaaaatgacactaaattagccatccacctgtaatatatattgtttgtcctgttaaataatcactttcaggttttagaatattttttacccaaaaacttatatcttttcctaaagctaatcttccagccggaatttcacttttcacttcatctaaaacatcctctgaaaagatagcattcataggtgtatcaactgctccaggggctaaaacattaacagttagaccactagctgccacttctcttgcatacgcttgactaaatcttgtcaaagcagctttagaagcgctatacgctgattctaacgcacttgcttggccaccataaacagatcccaaataaataatccggctatgtttatacttaagcaaattagactctaatagccttgttaacttgaggggagtaagtaagttaattttcatttcttgttctagattgtctaagtcttgttccccaaaaaagccatagtgtgttattccctgggcaaatattgcaacattaactggtaacaacccttggcaaaattgctgtaattccatattacttgctaaaaagtctaatttgattgcaataaaatcttgctcaggaaattgactcattaacttatctgctaactcactagccacttgctcttgattactataatgtaaatacaatgaccaaccatcagcagctaactcagttgctattgcttgaccaattccgccagttgccccaaagataatcgctcttttcaaataatcatccctattctacagtggaaaagactgagcaagtttcactttcagccaataaatcctgacaaatttgccaatatttttcaaaattcatttgttgcaataacttaatcgtgtcaaaaatattttcaccattaattgcttcttcagctaactcaaaacctaactcagataaattattaaaagcagacaataaagtagccattgagactttcttttgcatttcaaaaaggtcttttaattcatccatttgctcagcagttttttctgaagaaaataaagtttctttcacgttattcaataagctattaccattattaatacctaaaatagtggcaaagttaccttgtctagtgtaattaacaccaaattgtaaagggctggttaattcaccatgtaccattttatcttggtaccaggaactattttcgcctagcaatgattctaacattatttctactagaatttggcctaaatcgttatttactaatactttcttaaagtctggcaatttaactcctaaacaaaagtaaggtacttctgtcttatttttaaactccttaaggcctaaattacccatttctggtttaaaagtatgctctctcttttgaccactttgtaagtattgcttatctaatttcttaatttgaccaaataaccgagtaactgctgaaggtgcaaaatcaccaactgcaataaaatgcatattattggctgtataattttcctgataaattttggccaagttgcgactatttattttcttaatcgtctgacttgtaccaccaatatcaaggccaagattactgtctccaaagagctgcttcattatgctatcgctaattggccaggtcggttcatcgcgatacattgctaattcttgatcaataattgggcgttctttatcaatactctttttactaaaattgggatccccaacaagttcaaataacagatcaacaattttgcttatattatcgatactattagcataaaacatcgtcgcattataactagtaaaagcattggtgcttgcgccaatttcgtcaaatcgttcggtaatatctccgctctttttactaaaaagtaaatgctctaaatagtgagcggctcctgggatttgcttatcactactcccaaagtctacaataattccaaaaaatttttgcttaaaaccttttctcaaaaccacttgtgccgtaagtcctgaagaaaaagtctttttttcaatatctaattttttcatttgatataaaaactttcatttaaagtaagcttattagccaattttatcaaatctgttacttgtatttttcgaatactctttcctaaatctaagaaagaatattcaggtattagtaaagctcgtaattgcaacataattcgatagccagctcgatctaagccatattgatgctcgttataaatagccttttttaccttcttaaaaattgcctcatcaatatctcctgctttaactttttctatttcttcttgagcaatttgactagcctggtctagcttatcatgatttacccccgcagaaactagtagtaaagagttattaacataattatctgcatcaacagcataagcagctcctaattgttctcgaatttttctaaacaaaacagaactatcgtccccagctaaataacgagctaaaaactttccagctagacgctcttttttgttcagctgaccattatatccaaatcccagcaacatttgtgcctgagcgaaacctcttttttcttcatcagtaaatggatcaggtaaagcttctataactaagttagaactggcaaacttagcattaaaatcataatcgctaaaagcttcttttaatatcttaaccacatactttgaattcttagcataaccaatcatcgcagctggacaggtagtcaaagcctcggtatatgcatcaagcccctccttatcagcttccaaaatttcattgattgggcccataattccatgcgcaaaatcaggttggtcatgataccattttttgaagaaatgttcccaagcataactagtaggacttgccattaattcttgatattcattaaaaagttgattttgaaccaacttaattaccttagaatttaagttagggtagcggacaattcgactaaaagtctcaattattttttcatagctatactctggatccattacttcaagtggctcaacatagcttaatcgatacattaaaataagttcgcgaccatataactgtggtgcaacatcaaaagtcatattatataaatcggtcaatgcccgcgcttgtttattaatagtattaaaatactggctactatttatttgcattttagccaataaactagccattgctaaattgtgtccagttaacggcattttcaaaaagaagccaatattagccttggttaaattttcattttctgtaataaaaaagttattgtccattatcattctccatcttaggctgaactaacacttgtcgtggcttagacccttctgaaggtccgactatgcccttagcttccatttcatcaataatccttgcagctcgattataacctattctaaagcgccgttgcagcattgaaacactagctgattgctgtttagttactagtttaactgcttcattataaaattcatcttctggctcatcattattgtcattatttgaagattcttcacctttttgcggcatcattgcttcgttataatcagcttcttgttgactctttacccaatctactactttttcaacttcttcaacagaaatataggccccttgaactctctctggtttagccgctccaattggtaaatatagcatatctccacgtccaagcagcttttcagcccctacttggtccaaaattgtccgtgagtcaaccccactagatacagcaaaagagattctagaaggcacattagccttaattaacccagtaataacgtcaacactaggtctttgagtagctaatatcatgtgaataccagctgctcttgccatttgacctaagcgaacaatagcatcttcaacatcatggcccccaaccatcattaaatcgcttaattcgtcaactactaccaggataaatggcaacttcttcataactggcttttctttgtcttggttgttttcaataaccttttgattgtattcaccaatgtttcgaacgccaccagcagcaaatagtttatagcgcctttccatttctttaacagttttgtgaagagcatttgctgctaactttgcatcagtaaccactggaattaataaatgtggtactccactataaacagatagttcaaccatcttaggatcaatcagtactaacttaacatcatcagggttagccttcatcaaaatactggtaagcatagtattaattgcaactgacttacctgaaccagttgaacctgctattaacatatgtggcattttagtcaagttcgcagaaattgttgttccagtaacatcttttcccaatggtacatcaagtggattagcttttgatttattatcttgattgagcatgacatctttaaaagaaaccgcactagtggttttattaggaacctcaattcctactaaaggctttcctggaataggggcctcgattctaatgtctttagcagctagcgctaatgccaaatcatctgcaagattgacaattttacttaccttaacaccaactgcaggttgaatttcataccgggtaacagttggccctaaaattgccttttttacgtttacttctacaccaaatgatttaaaagttgactctaaaacttgagtattatggcgaattaagtttttatcactagattgatctactttttttattggggctagtaaatcaagtggtggcttttgataattggaatttacatgtgtaggcttaatctctccatgatcaacattgcctaattccattttcatcttttggtcttcttcagcaaaagcatgacttttaggcaaatcatgctcttcaggattagttggtatctcaatttctggttcagactggactggttgttcattagtggttttttttgataagtctggaataacatctaaatcattttgactctggacttgcatatcacctgtatcaggaaatatatcatcattatttgccaaaggatcttgcaaattcttgcgattatcacgattttgtaagtaattatcacgagcttcaacatatttgtccttaagtttgatacctgcatctttattcgtctcaataaatttttgactggaagactggaacaaatgtaatatttgcacgaatttaacatcaaaaaacattaataatccactaataagcaaaataaggcccagaatgactgcgcctaaatttcctaataagggataaaaaatattgtaataaaagctaccaattaatccgccaccgacactctcagttaaattaccgcgactaaattcagctaagatagttttggtaaaaacattaataaatccattaaagacatcgagacgattaaagaaattagcagccaattctaaaactaacccgctgtaagccaaaaacaggccactacttctcttaaatccaattaatggtggctttgaataaattaacattactgatccaaacattaaaaataaaaatgcaaggatagggtaactatcaccaataaaaaagcggagaacatttgcaaattctttaccgattaatcctaattttgcaaaagtaagtaaggcataaatcaccaaaaaaatgccaaagattgcccaacgtaattctttttgagcaacagtcttggacttagctgtctttttcttttttcttggcatttcttctcccccttattaattaaaagtttggtgtaaaattcaagttaactggttcatctaaagctaccgaagttaactgataagttaaagtttcaatatattcaactagtggtctgcttaagagcttataatcactcttttcaagatcttggccatccccataataatcttttaagaaaacaacctgtgtaattagtccagaaactgtaaattcacctggattaggacttacttcaaatggaactgcaatttcaaaatagcttccaccttcagcttcaagcaagttaccttcatcatctttttgggctgcttttctcaacgcaatattaacttcacttttaacatgattttcttcattcaaatcataatgaaaatttcttactaatacgggagtttcttttgtaaattcaaccattttattcatctcctagatttctttcatatcgttcatgtctgttgtaatcatcttttaacttatcattttcataatgatgactcttttcaagatgagggaaaccttgttgacgtaaagcttccataatcaccatggcagctgaatttgataagttgtaagcacgaatgtggttggacattggaattcgcaaattgcggtcataatactctctcataaaagtttctggcaaaccagtagtttctttaccgaagacaaaataataattcttattttcatctgtataatcaacatctgtgtatgacttagatgaaaactttgaaattaaatacatttcatcattaggtcctaaagtttccaaaaaggccttcaaatcatcatgcttatgaatttcgactttatcccagtaatccagtcctgcacgcttcatttttttattatcaagttgaaatccaagtggttcaattaagtctaaaacagtttctgttcctgcacaggttctagcgatattaccagtattagctggcataagtggttcaaataatacaatatgattagtcatttttatctcctaaatctaacttagtttgattctctttaccaatttcaaacaaatcttcgtcattataaaagcgtgacacagatttaaaatagttaaaacttcgtgatacaacaattttaacaactgcatagattggaatgccaaaaatcacaccccaaagcccccaaacagcactggctccaattaaaaggagaattgttgttattggatgcattttcatcttgtttccaacaataattggagaaataaatcgtgtttcaattgtttgttcaattgcaaaaacaatcaatacattaattagcatcccccaagaagtaatcgaagcaattatcaaaacaggaatcaaggcaataaatgtaccaaaataagggattaatagcataaaagcagccaaaacagccaaagcactcccatatggtaaaccaattatattatagccaatagcataaataataccgacccaaactgctacagtaatttggcctcgaatataggcactgattgcttcattaatatcatgaagtaatctagaaaaactatcctgccatctacgaggagcaaacttagtaagataaccatttaattgatggccatctttaagcatataaaataagacaaatggtgctgtcaacaaggtcataaaaatcatagtaattacgctaacagcagatgaaatatttgttaacgcagcagttccagtatcttgccaagacttaaaaagagtcttttcaatactatcaattacactattaatattagacttaacaccttttagatgtggatcgtgtagcaaattctgaattgtttttacacttgtatcccaaatattaggccaatttttaattaaggcatcaacttgattttgaataattggtaatagtgagttaataatccaaatcaaagcaccaagtactagtaaaaataatactaaaattgttactgttcttgggacttttagcttttgctcaaaaaaatccacaattggattcatcatgtaatattgtaccaaggctaaaagcaatggtggtaaaatcgcacaaaaaaacatccaagctggatttaaaataaatgaaatctgttcaaataaaaaaattatcagaaagaacagtaatatattaagtaaaaaaattgtaaaacgattattcaaaaaccaatctttaaataaagtaggccgcttcaaattagtcttattatccataaattaacccctttttatgtctaatctaaattttagcataaataaaactcgcctatcttaaaataagcgagttttttagctatttattgattctaaaaagcttttttctagcttcttcaatcaaaattaatggtattggaatgagacaaagcattatccaatcactgatacctaaaacaccagtattgaagataccctgaactcctggagtaaccgttaaaataataaacaaaattatttcaaatagaattccagtccagatgtgaggattaataaatagaccttttttaaatactgataccttttcagttcgacaattaataacatttgcaatttgactaaagacaattgcccctaaggtcatagttgtagctttaatataaatatcaccactagctgctaaatgtccgaagactaagccagcttgtttatttacaaagaagtaagctgcaattgaaactaaagcttcaagcaatccataccacaagaatgctttaactagaactcttttattcaaaagatgctcatctcgactaattggtgcgcgcttcataacgtctggatcactaggctcagcccccaaggctaaagcaggaagcatatctgttcctaaatcaattgtcaaaatttgcataactgttagtggtagaggtatcaatccacctgataaaagatatagcactgaaggaattgcttccggaacatttgaagaaagaatatatgtcaagaatttacgaatattgctatatacagttcttccttcttcaatcgcagcaacaattgaagcaaaattatcatctgtcaaaatcatattagcagcatctttggcaacatctgtaccactaagtcccattgcaatcccaatatcagctctcttaagcgcaggagcatcatttactccatcaccagttgctgcaacaacttcaccattctcttggaaagtctttacaatcttgtatttctgttcaggcgctactctagcaaagataacttcgtcttttaaagcttcacgtaattcgctatcagacatttcatcgagttcacgtccatcaattacgcgtgctttttcagaagttatcccaatcttaactgcaactgttttagcagtcaatttagagtcacccgtaaccataacaacacgaatcttggcatcatgacaatgcttaattgcatcataaatttctggtcttggaggatcactcattgttaccaatccggcgaataccaactgactctctgcagtttcaattgtcagattagaaattgcatcatcatttttaatcttcttatatgctaaacccatgctacgcaaaccttgacgcgcataatctgcatttagtcgatctaacttttgcttatcttcagctgttaatggtttgacttcaccattaacttgaacaaagttacaatccttaattaagtcactgtaagagcctttaaccaaaacagctgcttcactatcgctaatttggttaacagtagacatttttttacgttctgaatcaaatggaaattctctaagacgtggcttcttaaccatttgtttatgaatatcatagcctgccttttgagccataattactaaagatgcttcagttggcgttcctaaaatcttattttggccatctttattttcgattgaagtatcattatccaaagaagctatctcagtaataacttttaaatctgggtgttcatcataccaaagttgtttaccatttaattcaacttgtccattgttaacatatccatcaccagtaacttcaaattcatcatttaaagttctaatatagtggattgtcatttgattttgagttaatgtaccagtcttatcagaacagataactgttgtttcacccaacgtttctactgaatttaattctttaaccaaggcatgctttttagccattctcttaacaccttgagctaaagataaagtaactgttggtaacaatccttctggaataaatgcaacaatcattcctaaactaaaaataaaagctgctccaaaaggttgctttacaaagaaaattgatgcaataaagaaaaatagtccaatcgtaaaggcaatgattgaaatttgcttagtcaatcgatttaattcacgagttaaaggtgaatctactttttcctgttcttgagtcaagtgggcaatttgtccaagctcagtatccatccccgtactaaaacaaatagctgttgcagtaccagatacagctgttgtacctgaataaaccatattactttcagcatattttccttcaccaggatcaaaactagtccttttactttcaggaactgattcaccatttaaggcagattggtccacttgcaaactagttgcactaataattctagcatcagctggaaccttgctccctgcttgaagtgcaaaaacatcccctggaactatatgcttagcttcaacttgttttttcttaccatcgcggtacacttgcacataactttcaagcattttatttaaagcgtctgttgccttttgtgcttgtcgttcttgccaaaaactaaatgtcccattaataatattcactaaccaaatagcaatccctaattccattgttcctgaaacaatcgcaataaaaccagaaatccaaagtaagattgccattaaagttgtgaagtttttaataaatgtttgccattgactttgcttaggaggccgctttatttcatttagaccatatttttcaagtcttttttctgcttcttctgaagaaagacccttactagatgaattaagtgtctgataaacgctatcaatttcactttgagcataaagctcgcgaattttcttttcgtccacttcattctcctctttcttaaatgttacttaaccattttaactcaaaaaaattaactagcaatgatatactaataaaagttcatgatgtgaatggagggattatatatgaaagttttcattggaggctatacaaaaaagacttcaaaaggtatttatcaagctgatttaaccattaaagatggtcaagcaagtttagggaactttactaattgtgttgaattaaatggacctacatatttcaaaaaatgtggtaattatttgttctcaattgccaaaaataaagatgaaggtgggattagcttctttcaactaaatccagttaaattaataaactcagtttttcaacctggtgcttcacctgcttatttaggaatcaacgaagataagcatttagtttatacagcaaattatcatacagcttatttatctgtatatcattacgataatgacggcgttagtttagttgatcaggttaagcatgacagttttaatttgggccctcgcccagaacaaaaagatggcgctcatccacacttttttgatgaaacaccttcaggcaagttagtttcctgtgatttaggtaatgacagtgtcgacttctatgacttaaaagatggtcatttagttcatctagcacgttatttaaacgaagcaggatttggtagtcgtcacattgtatttaataaagaaaataattacttttatgttgctggtgaattatcaagcaaaataaatgtcgttaaatataacgaaaaaacttgggaatttgaaaatatagctacttatagaactattcctgatgactatactgatcataacggtgttgcagctattagaatgtcaaacgatgggaagttcttatatctttctaatcgtggccacaattcaattactgtatttaaaataaaagcagatcatactttagaactagtgcaacgaatttcaacatttggtgaatttccacgtgatttcaactgggatagtagtgaaaaatgggttatcgctaccaaccaaaatacagacaatgccaccttatacgaaagaaatagcgagatgggaacattagccgtagttcaaaaagatgtcgcagttccagaaggaacttgcgtagtatttagtaaggagtagtttataatcaatgttaattaacattatcaaggcaattattttagggattattgaaggaattaccgaatttcttccaatatcttctacaggacacttatacttagcaaattatgttgttaagctacaagaaaatcaatcattcatcgatatgtttatggtggttatccaacttggagcaatcttaagcattattgtcatttactttaataagcttaatccattttcattatcaaaaaccaaattacaacgagaaaacacttggaaactttggataaaagttgtcgttgctgtattaccttcagtaatcattggtttaccattaaacgattggcttgatgaacatatgaccaattggcaagtaatcagtgctaccttgattatctatggggtattattcatcttacttgaaaattactacagaaaccgtgattctaagttaactgatttgaataaaatcagcttccaaatggcatttctaattgggtgcttccaagtcctttcattaattccagggacatcacgttctggtgctactatcttaggagctatgcttttgggtgctagccgttatgtttcagctgaattttcatttttcctagcaattcctactatgtttggcgcttccttattaaagattgtcaaatatgtacacgctggacatacttttgtaggagatcaattagcagttcttttagttggtatgatagtttcttttgttgttgcgtgccttgctgttaaattcttacttaaatttattcaaactcacgactttaagtcctttggttggtatagaatagctttaggtattatagtcatcttaattggagtttttgtaaaatagtgaggtgacctaaatgttcaatcttttattagtattattgatcatttggctattatttaagttagggattggtttatttaagattcttactttcctattaggaatcattgtaatcttttatatagcatcctttatacttctcccaattctgattatttttataattggattaggaataacaacattaagcaaagactttttataataaaaagttgtaatttgcaatgcccccgaaattcgtattcgaatttcggaggtttttatgtagaaattatttataaagaatgaattaatctttgatacagattgaggttagcaatatcaacatgaattagctatgcaagctattaaacacagcatgacaagaaaaaacttttctattcaatgatagttctttgcatacttaaaagaggaacgatttactgtaaagaagataattaaaaggattgattctgatacggtatcagaatcaatccttagttgcataatatcaataaaggagctattttggttggattactataatttaatctaccaatttttatcactctcataattattcaactcttaaaaataacaacttattccttgtcatttttcttaaaaaatccatgatagccaacaatcgaagtaaaaattaaaactataattcctaaaagggaaacttcacttttttgcaaaccagtttgggggagtttagttgcaaattttataaaagtttgaggaaatgttattgttttgaaaagtatttttttaatatttgattgagtaatattcgaagttgggagtgtcgaattatagttaaaatttaaattatctcttgcggctgcattatcatctctatttctattttctagattcttattactattcactacctttttcattatggaatttgaactagtcgttgcactaacattttggctagttagataactcatacccgcaaacaaaattaaagaaaaaactattatggtaaacctatttaaaagttttcttaccatttttcttcctcctttaattttgttatttttagcttaatctgcttttttgaaaaaagtgtgaagaaagcacgaaaaaatagcggaatttatagcacttacgtgctataaattccgccacaaatctgtcatatcttgaggatcactaacttcaactattttctcttcattagtgaatgggtctggaaagctcaaatgggagcaatttaaggcttgtcttgcgaaattgtcatctattccatatagtttatctccaaataaaggatggccaatatgagccatatgaacccgaatctggtgcgttcttcccgtaaaaagtcttaatttaactaaacttgctccttctttttgagccaaaacttcatactgggttaaagatttttgcccattaggtattacataacgcttaacactatcatcaatctttccaattggagcatcaatcaaacctgcttgctcttcaggattaaaattactatgaactattgcatgatattcttttacaaaaacatctttctttaattcactaaacttgctatgggcaactgcattttttccaaccaaaactaaaccgctagtatcacgatctaaacgcgtaacaatatggggctttaaaaaagcttgttctgagctttttttctttgaaaaataacccataacccgattaacaaccgcatccccatcttcataccttgaaggaatcgataaaacattagcaggcttgtttattactaaataattatctgtttccaagacaatttcgattggtttatttgatggtttcaagaattcattgactttttcttttcccattacaaataaaacttcatcaccattttttaacataaagttagtaaatctgcggcggtgattaactaaaagcatccctccattatgcttggcattaacaataacctgcttcgataacttctttttactcaaaaaaagtcccaatcgtttgggatctttttcagtcactatatacttaaaaatcttcatttagccgataaatgcatctcctactcttgaccaaaaatggtgatgaccaaacttatcaaagtgaatcctttttttagaaatgcgataaataacgcgattaacatgatcaaccggaattcgatggccatcaattatcataattaaattatggccatcattaggcaaaattgtaatccattcatctggtgcaataacgattggtgatccgatagttctaaaaacgcgattattaattgaagctatctctgtcatttgcaaggcctttaaacggggatgaattaccgcaccacccaaagccttactataagctgttgaaccagttggagtcgaaacgcaaatcccatctcctctaaagttttcaaacaattcgcccttaatataaatattagcaactaaagtttttgaaattcgttttatacttgcttcatttaaggctaaaaatcgctcttgtctaccatcatccattaccaaagttaattctaacaggggataacttgaagtagatggtgctgtagtacataaagcatcaaccatttgatcaatatcataatttcgccaatctgtataaaaccctaaatgacctgtgtgaacaccaataaagcgaactgaatcaatcagtttttcatatttatgaaaagctgataataatgtaccatctccaccaactgagataacaacatctggatgttcttcatctaaacttatcttcttttcagctaataatttttttaagtgttcaactacttcaatagtctttttatggctattattgacaattgctactttcattattgttccttgcccttgctttgattaaataccttttgggcatcttgcacttctttacgaataacactcatttcttcatcaagtttatatgcggcttctgctgttgatttaagtcttttagaaacatcttcaggatattttccttggtatttataacttaaagtatgttcaacagttgcccagaaattcatcgctaaagttctgatttgaatttcagcaattaaagttttttctccttctggtaaaaaaacagtgtatttaatgaccatatgatatgaccgatagccggatggcttagcagcatgaatataatcacgctcttcgaccacttccatatcactacgttcatgaattaagtcaacaaccttataaatatcatccacgaattgacacatgattcggatgccagcaatatcttgcatatctgtttcaataacttctggactaattattcgtcgttgcatcttttctttaatggagtcgacagttttcacacggccaactacaaattcaattggtgaatgttcaccacgagtcaaaaagccttgcctaaggcttctaaacttgacctttaattcttgtacggcctcgttatatggccataaaaaggtctcccaatcagtcatgctcattgccctcctcatattttctcaaacacaattattctaacataccccagcagctttctcacaatataaaactagatagctgtataataaaaacaaaggagtgacatcatgagtaaaaatcgagaaattgaatcgaaaacattattagaaaaagctgttttttctgctattttaaggtcctttcctagcaaaacaagctttactcaaacaaattattattttgataatgaccaaaaaactttaaaaaataataaaatcagtctgcgaattcgactatatcctgataaagctgaacaaactatgaaagtacctgctaaaaaacttcgtcaggaaaactaccatgaagttattgaaattaatgataatctttctcttaaagtcgcacaggaaatcgtcgaaaatagtttaaatggtggggtaacaatatttggacacaattgtggtacttacctttctaacaactttccagatatttgccaagatttaacgatattttcttattctaagactactcgccatctattaacaggtcctaataactgtgaactaacacttgatgaaacttcataccctgatggctatcgagattttgaactagaaatagaaaatgataatcctgaattaatcaagcaaactttaaataccttacttcggcaatttaactttcatctcaatcaaaaaaatactaatcaaagtaaaatcgccagggctagcctacataaaaaataggcaaaaaaatagcataatgcccatacattcgctaaaatatagatgaataaaatttgttggaggcttggaaaccatgtttgaaatttttatgtttgttaatccaattggcacatgttgctatcaaacagaacaaacaattatgaaaaccatgaaagaggcagatgctatcactcgctaccatctgattcctttagcaaatatgaaaacaattcagagtgacttaattagaaagcataagtgtcctactaacttagagacatataatcatgcaagtgaagaaacgtttaccgctttaaaggactaccatgctattaaaatggcttacggtaacaaattagctagaaaatactgcctagcagtacaacacaatattaatgatcttaataaagaatatgatactaatttgtttcaagacttggtagaagaattcggcctttctctttcaaaaatcaaaagtgcccagatgtcagcatatttaagtgaatccattgctgctgatgaacgcttagcacaaaaatggcacataaccgatacaccaacaactgtcatctttaatgatgaagatgaaaatagtggcttaattgttgaaggtcatttacttcacgatgagcttttacaaattattaatggtaatgaaagtcctgattttaatgaactttcagcatcactcattaaacttcattcaactaatttacgtttattataaaaacagcaacctaaatgcaggttgctgtttttgttatatattcttctacactagttctcatccctggactacgccagctattaaataagtaatcgggtaaatcattaagggaaattctgcgtaaatataactgttcagcaattctcgtacccaattttgtttgcatctgaacttgctttaataaataacttttttgattatttttatttaattgatactggataaattgtggcttatattgccataatttacttattccgacttcgtcaattctaaaacgtttaacttgatacctaatcttccttgttaaaggttcttgcaaaatttgatattttaaggttagaagttcccgttcactatcaatttctaagtaataaaagccccacttttggttaaatctcaaaaaaatcgtttgtcgttgatttaaatagttcgataaataatggcatcggcctacaatccaaatatcaattatcccttctttcttgtataaaccatgacgatgggcgaattccatttcagaaagtggtgcacattgaatttcaaatgctaactgtgaatttacaagaatatccgctcgcagttcacccttggccaatggaacctcttctttagctggaaaaccggcagcaactaaggctgtctttaagttaatttttccacgataatgctcttctttttccccttgttgccccacttgaccaacctgatgtttaaaaaatggtagtcttttttctgataagactaaaataacttttttcctacatcgcgggcaaaaatatttttcttggtttaaggaagtgattttattctgaaccctcgcttcctcagctctggctaaaactaatttattatttaaaagtgctgcatacataataatcctcctgattttatgtacacaaaaaagaggccaaattttcggcctcttttaattatttaaaataagataataaatcagctaatgcatcttgtttaatcaagcatttcccattatttttaaataaattaagcgtcttgttatctgctacagtaccaaactcaaggcatactgaccagacactacctgaatcaatatcttcatcactacctaagttattcatttgtaataaatagtgatctttaaaagtataaagactcgccgctactttatctgtcggtaaactatccgccaactggactacttgatcaatatcggaaaataagaaattagcttgattacttacttccttggttacactatctttatcataattttcagaaatgcccaaccccttattaagtctttcaattgggtcagaattactttctcgactattgtttcccattcctaatagattaccaagttgtttttgaatattatcagcatcagctttattatattttgttattaataaatctaggccaccttcattaggcataacttggaaagtaactggttgattatctccggcaaaagagtgatccgtatctacctcgcgcaagatggaatagaaaaagtcttggatttcacttttatttccaagtaaatctagcatcctaatgccacgactttttaattcttctgagtccatgtgcactcgaatagtattttcatttattttctctacttgcactataatccctcctttgtactagaatattgtaacctaaattgccaataaaataaaaacgttagccgaagctaacgtaatttttaaaggtcagctaacttttgggccttagctaactctaagcgacgtacctttcttggtaagaaacgtctaatttcatcatcattataacctacttgaagtcgacgatcatccataataattggacgtcgtaacaagcttggattcttttcaacaagatctaaaagctgatcaattgaaagatcatccaaattcacatgtaattcttggaaagctttagagcgtgttgaaataatttcttcagttccattttcagttaaacgaagaatattaacaatatcttctttagtcaatggttctgaaaagatgtttctttctttgaaaggaatatcgtgttttttaagccatgctcttgccttacgacacgaagtacaactagatgaaacatataaattaatcatttacgtcacgctccttaaataatataacatcatttcttcctgtgtaatttattatacactatcaccttagttttataaagttaatatttacttaatattcttaaaaccttatattgttattctttattctataaaattattatatcaattatttttgaagaaagtgtgaatttacaaaaaaataaaaagagtctacaagagactctttttattcttaacctaaattaagcttgttcatcaaatcttctactaacttcttattatcatcattagtcaaagattcattaattgctttatctaccaagccttctaaatccttagtatcaagcttcttcatttggcttctgatacgtaagattgaagtagcactcattgagtattcatcaagacccattgctaaaagaagtgggaacattactgaatcaccagctgcttcaccacacataccacaccaaattccgttatcatgagcagcatcaatagtgtgcttaatcaaacgaagaagtgaagggttgtaaggttgatacaagtatgaaacatgttcattaccacggtcagcagcaaatgtgtattgaatcaagtcgttagtaccgattgagaagaaatcaacttccttagcaaattgatctgcaagtacagcagctgctggtacttcaatcatcatacctacttgaatatcatcaccaatcttaacgccatctttaacaagcttttctttttcttcgttgaagatagccttagccttgtgaagttcagctaaagtaccgatcattgggaacatgatacccaaacgaccataagcagaggcacgaagcaaagctcttaattgagtacggaagatttgatcttccttaagagaaattctaattgcccggtaacctaagaatgggttcatttcttcaggaagtggtaagtatggtaagtgcttatccccaccaatatccatagtacgaataacaacttgcttaccattcataccttcaatgaccttcttgtaagcttcaaattggtcatcttctgaaggaagttcgctagagttcatgtacaagaattcagttctgtacaaaccaactgcttcagcgccgttttctaatacaccagccatatcatctggagtaccaatattagcagcaattgtgaaatgcttaccatcttttgtaactgatggcgcatctttcaatttcttccattcagccttttgcttcaagaaggcttcacccttcttcttgtagtccgcaacttcttcatcagaaggttcaattactgctaaaccatctaaaccatcaactactaaaagttgaccatctttaatgtcgctagtaattgagtcagtaccaacaactgctggtaattccaatgaacgtgccataattgctgagtgagcggtacgaccaccgatatctgttacaaagccttttacataatccttgttcaattgtgcagtatcacttggagttaagtcatgagcaacaactactacttcatgatcaatagctgctggatttggcaaattcttaccaagtaaatgagccataattcgcttagaaacatcacgaatatcagcagcacgttctttcatgtattcattgtcagtcatgctttcaaagattgtaatgaacttttgacttgtttcatcaagtgcaaattcactgtttacctttgaatccttaatttcttgcttaattgccccaatatattcaggatcattaagaattaataaatgcgcttcgaaaacttgagcttcttcttcacccaagttttctttagcaatatcacgaacactttcaacatcgtgaatagaagtttctacagccttttcaaagcgagcaacttcttgttctacatcatcgactgaagctttagtaaaagaaagatctggctcaactaaacgatacgcaggagcaactgcaataccgtcactagctgcaataccctttaaagtctttgtcattattcagctaagccttcctttttcatagtgtcgctgattgcttcaattgcttcggcagcgtcatcaccttcagctgaaatagtaacatcagcatctttaccaacaccaagtgacataacacccatgattgacttaaggtttacgctcttgccgttaaattccaagttaacatctgagctaaacttagaagcagcttgaactaataaagtagctggacgtgcgtgaatacctgtttctgcaataatgtgaaaatcgcgtttttccatagttaaaagtctccttaataattcatttttaaaatacccgtacgatattaagagtaacatgtttataagtttaatacaacaataatgtaaatgctttcaaccttattcattactatttgaagcagtgtagataattgcaccacctctaagggcacgtcccttgatataagtcctttttccaaaagctcgtagagcctgttgaaaagcaaaagcatccttagcttctatcttatattctgttaattccccatcaactaattgatttaagatactctcgtaatccattttttcaccagcttctataaattctgataataaagtttctataatgaacccctgctattttaactagagaaaaatactttggcaaatcaagagcttagcacttgactagttagagtgctaaaactacaatttaagtaaagttaagggaaaggcggtatataaatgttatgccaaaattgtcatgaacgccctgcctccattcacctttacactaaggtaaatggcgaaagtcgttcacttgatttatgccaaaagtgctaccaagaatttcgtgccagtcaaggtggaaatcttggtaacgataatataaataatgataattacgataataataaaaatccaaatatgggagatttatttgggaattttaacaacttattcggctctatgaatagtgctagtgcaagtcaaatgcaaaatcctaaaggcccaggtcgtggcggaaatgggaacagtattttagaccaatatgggacagatttaactgctctagctaagcaaggtaaaatcgatccagtaattggacgagacaaagaaattgctcgtgtaattgaaatcttgaaccgaagaaccaaaaataatccagttctaattggtgaagctggtgttggtaaaactgctgttgtagaaggtttagcccaagaaattgttgatggcagcgtccctgccaaacttcaaaataagcggattgtttctcttaatatcgtttcaatggtccaaggtacaggtgtccgcggtcaatttgaacagagaatgcaacgcctcattaaggaattgcaaagtaatccagatttgatcctatttattgatgagattcaccaaattgttggagctggtaatgccgaaggtggcatggatgccggcaacattattaagccagccctcgcccgtggtgacttccaattggtaggagcaactactattaaagaatatcgtgaaatcgaaaaagattcagctcttgctcgacgctttcaaccagtagaagttaaagaacccagtgtagatgaaacgattaagattttacatggtatccaaaaacgctacgaagactaccaccatgtccactacactgatagtgcaattgaaagtgcagttaagctttcatcacgttatatccaagatcgttatcttcctgacaaggcaattgacttacttgatgaagctggttcaagaatgaacttaacaattccttttgttgataaagaaaagatcaaagaaagaattgatgctgctcaacaattaaagcaagatgccttaaagaatgaagattacgaaaaagctgcctactatcgtgaccaaatcgaaaaatatgacaagatgaaagatcaaaaagttgatcctgataaatctcctgtcattaccgacaaaattatgaataagattgtcgaagaaaagaccggcatccccgttggcgatattcaaaagcaagaagaaaatcaattacaaaacttggctagtgacttaaaagctaaagttatcggacaagataaggccgttgaacaagttgctcgcgcaattcgccgcaacagaattgggtttaacaagtcaggtcgtccaattggatcattcttatttgttggaccaactggtgttggtaaaactgaacttgctaagcaagtggctttaaagatgttcggttcaactgatgccatgattcgcttcgatatgtcagaatatatggaacaatattcagtttctaaattaattggttctgcaccaggatatgtcggttacgaagaagctggtcaattaactgaacgtgttcgtcacaatccatatagcttaattttacttgacgaaattgaaaaggctcaccctgatgtcttaaacctcttcttgcaaattttagatgatgggcgtttaactgattctcaaggtcgaactgtttcattcaaggatacaatcattattatgacttctaatgctggtcaaggtattaagaatgccagtgttggatttactgccgaagcaaatccaagtaaagaatcaactcgttcatctatgagtcaattctttaaaccagaatttttaaatcgtttagatgatgtcatcgaattcaatccactctctaaagaagaccttctcaagattgttgacttaatgattgctaaaaccaatagcatgattagcgatcaaggcttgcatattgatgttactgatgcagctaaagaaaaattagtaaaagaaggttacgaaccaagtcttggtgcaagacctttacgtcgaacaatccaagaagagattgaagacaaagttgccgactttaaacttgatcacgccgatgttaaaaactttattgctgatttagctaacgatgagattactatttcagcaaaggaagactaaaaaattaaagcacctaaaggtgctttttttatgactgaattaaaagttttagagtatactataattagaaatgatatagaaagacgcaggtgaaaataatgcatttaatcgacgttacaaatacttattctgacttagttcaaaatcaactaaattcgactagcgcacaatacattaaagtttattctcttggtaattcttcagttgtttacactgaaaccgattctgatatcgaaatagttattgaaaatcatgatcgcaaaatcaaagatgaagaagttgaattcttgattcgtcgtctaattcatgatgaccgtagttatgacattacaattgataagacaaaaaagattatcgcaatcacctgcaaaaaataatcaattaaagtaaaaaagttcagttgattaacttcaatgtgaagtatcaactgaactttttttattcaaaattccaaatattttctaaatagaattcttcacctgctaacaaagtaattgctgatacgtcacttccagaaaccggtggatattgacattcaagtgcaactccggcaaatttatcaatattattggcaattccagtcttattaaaatgattagctgtataaaccaccacacttggagcggttgttttaacagtaactgcgtgctccgcagtttctagttttgcagcaaaatcagatccattatttaacaaaaatggatgattaagtccaccttcagctaatatttgactatcatcactattaatcacgttagctaatttttggccattacgaaaatcaaaagctgttttatccacactttgccagcccttataaggtaagtgttcattatcaagtggcttaaagtaatcagctgcaatagttaaagtcgtatcagaaatattattcggttgatcgagagcaaaataagtatgattagtcggattaaatagggtggtttcatctgacaatgctctaatctgatattttaattgattattattgttcaaaatatatttaacttttacttttacattaccaggatatgaattgtgttctgctggatccaaataaataaaagtaacctctatttctttagaagacttcttgaattggaaattataaacttgctggtcaagcccatcaataccaccatgaatatgatttttttcttcattcattgctagaactacttttttattgcccaagttccaagtatgaccatgaattcttccaactattcttccaacagttccccctaaaaaattacgctctttactataatctaagcgacttggtaaagacagaaccatattctgtaacccggctttgcttggcattaatactttctctaaagtagctccataattcaatagctttacaactaatccttgattatttattaaagtaaattcatataaatttttttctagatactgaccgtatttttcaattttaatttccatagctttcacctattctacacagttaaaaactatattttttcacagaagcgcttaaaagcagccatccctaccttatctcgtttgaagactccagcatcttctaaaactcgtgcaaagaccttaccaacagccacttgtaactgagcatcagcattagtttcattccaagaatattcttgactcaattcatcagcccatgtcttatgaattggattaagctggttagattgattcaacaaatattttttcacttcattaagttcagacttcaatcttgctggcaaaattgcccgtcccattacttctatcaaaccaatattttcttttttaatatgttgaacatcagcatggggatgaaaaatgccatctggatacttatcactagtttgattatcccgtaaaaccaagtctaattgatattttccggctactttttgagcaatcggcgtaatagtatgatgtttaattccattagttacggctctaacattaactttttcatcagtataattagcccaaatttttctgatatgctctgcagcgttaattagctcacctttatcactactaactaaacgaattacgctcattggccacttaacaattccagctttaacatcaggataatcagataagtttaattccgtttctatcttagccttagccattggaaatacgtgccgtccgccttgataatgttcatgagaaagcattgatccgccaacaattggtaaatcagcgtttgatcccacaaaatattctggaaacatatcaataattgcaagtaagttactaaaagtcgtttgattaattaccattggttcatgcttttcatcaagaaaaattgcatgttcattaaagtaagcatatggcgaatattgaaatccccaaactttaccacctaataaaaatctgatgattcgatgatttgctcttgctgcaaagttatttctaccagcataaccttcagtttccatacataatgcacaagctggataacctgcattttttaacttagctgcagctgcaatgtctttaggatctttttctggcttagacatattaattgttatttctaaatcaccatattcagttttagcaggaaaaacaatatttttagcaatcgctcttgtttgaatataattattagccttgctcaaattgaaaaaccaatcagtagccctctttgcaccagcttgatatttatcccaaaatacatggttcacttgactaggactaggcgtagctaaatccataatttgagcctctaaaatttgtttagcagataaagtatctgctatctttttattagttacagctacttctactaatgaatcaagattctttaaaaagtcctctgccgcaggtaaattaagtgcttcatcaccaaccaaactcaataaatgattagtaaggtaaattttatccatttcagaataattaggattcaaacttaaaataagttcaatttgtttttcaattgctgtcaattacgatcaccaaaaccttccggattattttcatgccatttccaagctgtttcaattattttctcaatattatcaaatttcggtttccaacctaatatttttttagccttttctgaacttgcaattaacgtgctaggatctcctgaccttctaggtccaatgctggctggaatttctttatcagttacctttcgtgcagcttgtaagatttccatatttgaaaagccagttgctgaccccaaattaaaagcagtagatgaatttccagcttctagatatttcaaggctaaaacatgagcatccgctaagtctaaaacatggacatagtcacggacattagttccatctttagttggataatcattaccaaaaatttgtaaatttaatcttttaccagctgcaacctgtaaaataattggtattaagtgtgtttccggactatgatcttcaccaattgaagcatcaggcatcgcaccagctacattgaagtaacgcaatgcaataaacttcaaaccatccgctaaatcagcccaatgcattattttctccatggctaatttactttcaccataagcattagttggaatttgaggatctgtttctttaatcggaatttgctttggctctccataagtcgcagcagttgatgaaaagacaattctttttattccaaattgcttcatcgcttcaagcaatgtaaccattccgcaagtattattatcaaaatacttaagaggatttttcattgattcagggaccacagaaaaagctgcaaaatgaactattccgtctactttttcttggctaaaaactgaacttaaaaacttaaaatctcgaatatcgccttgataaaatcttgcacgtctatcgactgcttttcggtgtcccgtaattaaattatctaacacgataacatcttcaccagcagctaataattgtttaacagtatgagagccgatgtagccagctcctcctaaaacagcaatcgccatattatctccttaaaaatacttaactcaattgtttagcaccatctgcaatatttgcaacatagaagtgtgcatcataaccaatcttttcccgataaattcttccaactttattaataaagttttcaacattatcacgattgacgatagcaattgcacagccaccaaaaccagcaccggtcatccttgctcctaaaacgccttcttgttttaaagctgccgttactaatgtatctaattctttaccagttacctcataatcataggcaagtgatactcctgaagcagaaattaatttacccaactcttttaaacttcctgcttgcaaagctttagctgcatttaaagttcgtacgttttcaaaaacagcatgtcttgcacgtttaattaaagttggatcataaattaaataagtattttcatcaaattcatcttcagttaaatcgcctaaactagaaatacttaaatctttttgaagtcgtgctaaagcttcctcacattcactacgtcgttcattatattttgaatctactaactcccgacgcttattagtattcataataacgattacgttatcacccatctcaactggtaaatactcatacttcatcgtatttgtatcaagcaacatcgcttggttttctttacccatttcaatcgcaaactggtccataattcccgactttacgccgatataatcattttcaacttttactccaaacttaactaattcaattggagcgaaattaccttcaaacaattcatttaaaatagttgctactagcatttctagagatgcagaacttgataaaccggctccatcaggtagattaccactaatgtaaacatctaatccatgactatattctaaaccagctgcctgcataacttgggctattccttggaaataatctgtccacagtccttgcttttctttagttaagtcagcaaaagcgatttttacaacgccaacatctggaaaattatcagaataaagcaaaaaggcatcttgattattagaccctacagctgcataagttcccagcgtaatagcgcatggaaaaacatgcccaccattatagtctgtatgttcgccaatcaagttaactctacctggcgcaaaaaaagcatgttctgcttctttaccaaattgctcaataaacccctttttaacattagtacttttcattcgttttctcctcgagaaataaaaaagaccgcaaattatccactcaaaccggtgcacaatctgcagtcttgcctaattaaatagttacaatctacaattttatctacaatataattatatcatatatcacagcaattgtaagcgctattaatttttacttattttttgtacccattctccagcacatcccataaattaataagattattactccccaaatgtaagctaattttgtagaaatcgtataatttaaatctaaagaataaatatagatcattgcaaaacttaaaactaatccacaaacaagcattgctggtcttacaattttagttttgctcatatctttacttaaattagccatagcgattccttgtcccaataatggaatcaaaccataaaaaagcagtaactccaagaagactgagctaggcttataggaaggcaatattaaagacgcactaattaatataaattctaaagcgataataataccagcttgcttcttattaagatttgaagcccaagaagctgttaatataatagttacaactagtgcaaacatatacaatgtaaaaagtaaatgttgtaaaggattattaggtgtgtactgacgtaagtatgttgtcaactttagttgaacaaaaaatgctaaagccgcataaattaaattcggtaatttagttttcatggtagtaaccctttctacgtatataaataaaactagccttcaccctttactatcaattatacgctccccccatttttgtaagcacttgttataaaacaacaaaaaagcactgagcttctaactcagtgctttcctaacttttacaacttttcagttaattttacatctggatacttatcatggaaccagcgcattgcaaattcattttcaaataagaacaatggcttgtcataccgatccttaaccaagaggtttcgtgatgatgacatctttggatcaagttgctctggatcaatccagcgtgcaaccctcttaccaagtgaagtcatttctacttctgaattatattcattttgcattctaaacttaaatacttcaaattgaagttgaccaactgcacctaaaatatattcatcagtgttgaagttacgatataactgaaccgcaccttcttgaactaattgattcatccccttgtggaatgacttttgcttcataacattcttagctgttacgcgcataaataattctggcgtaaattctggaagtggttcataaacaatcttacgtttgccagcatagatactatctccgatttggaaattaccagtatcatataacccaacgatatcaccagcaacagccttagatacttgaacacgctcactagacatgaattcagtcgcattgtttaaacgaactgccttgccagttcttgctaaagttacatcaagtcctttttcaaattcaccactaccaattctaacaaaggcaattcggtcacggtgattaggattcatattagcttgaatcttaaagataaaacctgaaaattcgtcatcatctggtttaagttcttcatcatcattaaccttgtggctacttggagctggagctaaatcaacaaagctcttcaagaaagtttcaaccccaaagttagtcaaggctgaaccaaagaagactggagtttgctcaccagctaatactttatcttcatcgaaagtattaccagcttctttaattaattcaatttcatctaaagctgaaaggtacaaactatcttgacttaattcttcactttcaggtaatttgccgtcactatctaggtcgataaagtggtcatcgccatctttacgataaagctctactcggttattttgaatatcgtataatccctttaagctcttgccagaaccaattggccaattcatagccacaccttcgatacctaagatatcttctagctcagctactaaatctaagccatcacggccatcacggtcaagcttgttcataaaggtaaagataggaatcccacgtttacggacaaccttgaaaagctttttagtctgtggttcgataccctttgctgagtcaattaccatgaccgcagcgtcaactgccattaatgtccggtaggtatcttctgagaagtcttggtgcccgggtgtatcaaggatgttaattctcttaccttcatattcaaactgcattaccgaactagtaacagaaataccacgctttttttcaatttccatccagtcactagttgcaaagtggcctgacttacgtgctttaactgtacctgcacttctaataaccccaccaaacaaaagcatttgttccgtaattgttgttttaccagcatcggggtgggaaataattgcaaaggtccgacgcttattaacctgatctaataacttttctgccattaatcctctatttcttctttctttttatctggaattgttaaaagtaaagtaagaattcttgatcctttcattcttctagttgtcaaaaccataccattatctaatctaacagttagtttctcaccctttgctggaatcattcctaattcagtaatgacataaccagcaacggtatcaacatcttccatttctaaatcagtatcaaattcttcattgaaatcatcaagagtcatcttaccgtaaattacatacttgttatcactcaattttgtgaacaaaacttcagctgtatcaacttcatcgtcaatatcgccaacaatctcctcaattaagtcttcaatcgttgctaaaccaacaacaccaccatactcatcggttaaaattgctatctgttgttgccttttttgcatttcaactaacaactcacctaactcgatagtttctggtgcaaataacggcttatacataacttcttgataatcaagtttgtcaaaaccgagttttcttgctttacgcaaaacggttctaatgtggataacaccaacaattttatccttatcttgatcatacacaggaattctagaatatggttcatgtaatatatcatcaagattatcttgaaagtcatcattaatatctaccatgaatgcatccgttctcggcaccattacttcgcgcgccatcttaccttggaagcttaaaattccggtaaacattgaatagacggtatcattaatcgccttattatcgtgtaacttttcaatttcttgttctaattgttcaaggggttcgctttcttcctcacccgcaaattttttacgtagattttcaaagaaatttgacgccgcagggtcactactcatcttcttactctctttctatctttcataataaaaataaaacatgtcaaataatccatagtattataccatagctcaggacatttttatgataaaatgctattaagaaagaggttatacttatggaaaagaaacgtatatatttagtctttgtctttttattactaattccatacttatgcagtttagcagtcattggaattggatataatgccttagtccttcactctagcagcatatggcgttcaattattggagccctaacaggaagttttattatgttcgctatcaaggctactattcaacgtccacttgacttgatggctaaccagattaaagaaggcttttttgaacaatttcttcgtttctttagtgttagacggcgtccttggttacaacttgccaatattgttttagattttgcattatgttatattgcaactttcttagcccgcatctttctcaatttagaccaaattgttggcaattcagttggtattactttgatagtaatgtttgtttcaacttgcattggtgcttatcttgaatatgacaatctttcaattgatccgcgccaacattaacttattcactgactttcaagtaaagaacttgggtcagtttttttgtatctaaatcaactttttgtaaaacataaggaagcggtgaatcgcccaagttttcatatactttaataccttcagctgtaacttcttttaagaaactaggaatagaactattcaatggcgttgaaagatttgctaaatcaccattagtttctttaatagctacttcactttttggcaaattcatcttaagcatcccatgatttttagtaagttcatgttcactaatagctccataccagtacataaagctatctggattaaaaacaactaagctagcccgattattttctagattattttctttcaaaaaactagtaaattcttcatcattttccatcatcatattttgttcagcgaaactacgattctgatcaattaaactagctggaaatggacgtccataaaaatataattcattaattgttgttttcataaaacttctcctaatattcatctaattctgaaagagaaataacttctcctgccaaaaaacggtcaatatcactatttgaaaagccgtgactatataaatacgttcttattttatactttctttgactttcatcaagtcttttaaagcgcttataagcttttattccctgttttcttaaggcttcatcttcttgggtctcttcattaactaaatccaaatcatcaattattgcttgaaccaaatcagttctaaaaccatgttgcaataacttgagcgtcatttttttcttaacctcgttaaaggctattttgccaagttgattttttagcgatttaattaatctgcttccaacttctacccaatcttcaggttcaacttcagcaagcgcatcttcgatattattatcagagactttttttaagcgcaatttttgggcaacagaagctggcccatcttgtccaactgctaagtcattttttataaacaagcgagcatattccaaatcatttaagtagcccaaattaataaattcttcaattgcactatcaattgcttctggacttaattcatgcttcaccaaatattgtctaacttcatcaattgtcctaatttgatagcttaaataacgtgcagctaattcactagccttggcatctgtatcaaattgcttaatcttttcgatttctttttcagttagaacactatctttaaataatcgaaactcggttagtgtccgttcacttgctgaaaacgcatatttattatcaagaaaaatattatatcgtccgcttcttttttgtgcggaaacttttgtaatttttggcatcatatttcctttcattagtttaattccatgctatcaaaaaaagcgcatcttcaacactactttttttcttgcatgaagagttttttgcacttaagataagtaagatagtaaaattagatttttgtagaaagaattaagaaatggcatatcaaaagaaagaattaaaaaaagacattattattaccattaagcgattaggtattaatggcgaaggtattggttattataagaaaaaaatcatcttcattcctggtgctttaccagatgaagtagttgtagctaagataatcaagactcaccctggttacattgaaggtgaattagttcgaattaaagaaaagagtccaaatcgagtagcttttcctaataaggtagacccagaaattgggggcttagaattggctcacttaagctatgataagcagctagaatttaagaaagatattgtcttagaatctcttagaaaatatcatccccgcggttaccaaaagtacaaagtgaaaaacactattcctgctaaagaaaattggcactatcgtgctaaagcacaataccaacttgaatttagtaaaggcaaaaccaaattgggaatgtatgctcctaattcacgccgtctaattgacttaccagaaatgcctactcaatctaaaaatacccaaaaaacagagcgtttaatcaagaaattaattgataaatatcatatgccggtggctaactggcgcaaacattttgatggtattaaaactgtagtcgttcgtgaagctgcttcaactggcgaaatgcaagttacttttattaccattggaaaaaaaatcaatggcttgaagaaattagctcaagaagttatgaagcttgataatgtagtttctgtctttcaaaatgaaactgattggaataatccacaaatttggggaaataagacaatcaagttagctggaaagaatcaaatcgtagagcatattctcgataaaaagtttgctttatcccctagagcatttttccaacttaatcctgaacaaacagaaattctctacagtgaagctattaaactccttaacttggctcctgatcaagttctaattgatgcctacagtggcgtagggacaattggacttatcgctagtgactatgtaaagcaagttatcggaatcgaaagtatacctgaagctgttgaagatgcaatgcataacgttaaattaaaccatgtccgtaatgcggaatatctacaaggtagtgttgaaaaaatcctacctcaactaaaaaatagtggtgtccctattgatgccttaatcgtcgatccaccaagaactggattagctaagtctttaataaagactattatgcaagttaaacctgaaagcttcgtttatatttcatgtaatccttctaccttagctcaagatttagtcatgttaagtgaagtatatgatgttcgtgtaattgaaaatgtagatatgcttccacaaacggcacgttgcgaagcaattgctaagttagttttacgaaaagataattaagaaaatatacaaaaagaaggctaataatgtatctttatattattaccttctttttttgcattaaaaaacaggctacccttttactattcctggtaagtagcctgttcatcaaatggatgaggtagtattcctctagtcacaatcatcaatacgttttaatacattggctgacgcgaccttaataacatcacttgttcgagtttttgcgaaaagaacgcaacttaaattttaataatcaaatggaaaacttacgcgcagccaaatcataagcttattaactataacggctgacacctctattcagagaatcttcatttaactaacaatacaattctggagataaaaacctaaattttgttactttctacctcttccacacttttaatatagcattttatgtaaccgcttgcaagtgttatttcctagaatatttacgaatattattacttgttcctgcaaaataccaaccattagcatcagactgcacttcttggctttctgctaagtcttttaagctctcattgaatacttcttcgtattcagcaacagttaatttttgacgtttttcaagcatttctttgtgcttttcaggagctaattgtttttcataaccatctaccaatcgaccagtgaaaaattcagccatcgcacctgaaccatatgaaaataagccaattaaactgccagcttttggttgatcaacttcaagtaaactaagaagtgacatgtaaagtgaggcagtataaatattaccaacttctttaccatatgttgctcctgccacaaacttatcaagtaagcgagctgttgtttcaggatcttgaccttcaatagctaatttaagggctttttggcccattttagtgaatggcaagtggaaaagtaaggcttcaaaatcactagttttcaaattctgcttttgggtataatcttcaaaacaatgcttaaagaaatcaagataaacattagttgaatatttaccatcaactaaagcacatttgaagttgttgggacgccagaagtcatcaatatcatctgagtacatactagtttcactattaatttccataatgcttggatcttttttaatgagcaaactaatactaccagcaccttgagtaacttctccaggagttgccacaccgtagcgagcaatatcactaccaataacaatggctgttttatcttcatgagctttaacatagtcaattgccgtcataattgcagcagttaagccaaagcaagcttcctttaattcaaaagttctaatgtttttaggtaaattcaaagcctttttaacaaataatgaagcagactttgattgatctacacttgattcagtaccaaatactagtaagcccaacttatcaagttcaatcttatcaatatattcactagttgcattgattgccattgaaacagcatcttggcttttatcagcaactgccatcttattttgaccgataccaattaaaaatttcccaggatcaacatcgcgggccttagctaaatccaccatatctacaaatttatttggtgtataaaaaccaattttatcaataccgactttcatgcttaattattttcctctctaatttcttgtaaaaacttttttgcgtcagtttcactataacgtttttgcttttgcattagttcttttactgaatttttttcttcatcagttgctgttagattctttaaaacattacggatttgtaaactcatgtgtcccttttgaatccccacagttgaaatagcaagtaaagcggctaagttgttagctaacccaactgctgcaataatttccgctagttcactagcagttacctgtctcaaaatccgataagcaacttggacgtcacttcgcgatttaattgagccaccaacaacaccaattgcaagtggcaattttatttcaccaactagcttattatcttcaattcgccagttacttaaactttgataactacctgataaacttgcggcttgatgacaagctgcttctacagcgcggaaatcattacctgttgccagcaaaatcgcatccacaccattcataatccctttattattagtaacagcgcgatatggatcttcttgaccaattttactaagtaaaacaattttttgagctattttttcaccaattttttcatctttagttttagttaaactggcaaaagccaaagatactttagcacaagtatattgactaggatagttagataaaatagcatatagtttttcaattgtaaaatcttgactgattttttgtcccaaaaactccaaaattgtattagtccgattagctcccatgctttctgcaggatcaactaacacccgtaaaaacaataaatctgtttttacttcagcaataatttgtctaacgccaccaccatgcttaactagtgatgcaaattcctcgttaactaattttagataatccggctttttagcttcaaattcagctaatgaaaattctgctacttcaaaaactaattgtccccaaatacctgtccgctcacttttagcgctaactccaccattttggttaaagatatttaatccatggttagctgcagcaacaactgatgactcttcagttgccattggaacttgaaagctttgtccattaacaattgcggtttgcaaaactgataatggtaaagttagtttgccaattacattttcactaagcaaatctaattcacttaataaatcgtcatcaacatgattcagcttaattccattttgaagcagcatttttcgccgctcacttattggcaactgataaaatttcattttttatttcacccgttcaatctcaaaggcaattgctagcccgcctccaatacaaaggctggcaattcctctttctttattttcactaattaaagaatgagctaaagtacctaaaattctcgcaccacttgctcctaatggatgtcccaatgctaaggctccaccatgaatattaaccttactatgatccaagtgcaattctttttcaacagctagactagttgcagcaaaagcttcattaatttcaaacaagtcaatatcagctagagtttgcccattttcttgcaataatttctcaataaccactttaggaccaaagcccataatttgtggatcaagccccacttcagcataggcagttaacttggcaagtggctttaagttcaattctttaaccttatcttcagtagctaaaattaacatacttgccccatctgataaaggtgatgagttaccagctgtagcaacaccaccttctttaaagaccgtcttcaaactagctaacttttcaacatttgaatctggccgtacattttcatcatgatctaattctgccaaaggagtaatttcttgattaaagaagccagcagcttgtgcgcgagctgctttttgatgtgaattcacactaaattcatctgcttcagcgcgacttatcctatatttaacagcgacattttcacaagtatttcccattaacttgttgctaaatgaatcagttagaccatcattgagcatactatcaacaaaattgggattatctttttcggattttttagctagaagtggcgcattagtcatactctcactaccaccaactgcgacaagatctaaatcgccaataagcatttgagcttgggctaaacgaacagccttaagtgaagatccacatacttcattaattgttgtagcaacactttcttctctcatcccgctattaatagcaacttgacgagccatattctgtccaagtcctgcacttaaaacatttcccataaataaggcatctaagtcactagaacgcaaattagcagccttcaaggcgtctttaagggcataagtccctaactctacggcattaaaagctgctaactgaccacgataacgaccaaaaggtgttctctttgcggcgataatataaatgtcttgcatcaaatttcctctcatttctccaaaatctgatgctaattttactatttgatgtacttatttaaaaatgctttgattttagctttatattcatggggatgagttgcaaatgatttagcatggctagcacctggcactacccagagctgttttggtccacgactagcgcgataattcttataaaccatttcagttggtacaaaagtatcttttgccccatggataaacagcatcggctttgtattatgcttaagcatcttaatgctatcagcatctcccaagaaataaccagctctcaaacgagttattccactcaaaatttcaaccaaagggaagcgtggaaaagttggcatcgaataaattgcttgggcttcatgctcaatttcattcttagcattagtatacccacaatcttcaataaaagccttaacctgactaggtagtttcaagccactagtcatcattgtcgtagcaccacccattgaaactccaaaaatcacaatctcttgtttaggattatctttgagcaatttctgaatccatttttttacgtcatctttttccatccagccatacccaacataatttccctgactttgaccatgtccacgtgcatctgggagcaagacgttgtagcctaaagaatgaaataaagcagcatattcacccattccatctttattattcatataaccatgcaaaataataacagtctttttggaattattatttttgatataattggcatcgagacgtaacttattgtcactactcatcatgtatagatgttttttagtggcctttttataccaaagtttttcttgatataaggaatcagacttagtaagtggtttattactacttaaaaatgttttgtggcccggaactattgctacattataaaagtacattccagcccccaaaaaagctaagactatcaaggcaagaatagcactaagccattttaaacgcttagattttttcgatttctttcccatcatattcttcaccgtctttcatatactattcaaaataagcttttaacagtatatcactaaagggagtagataggaaatatcaaaaagtaaaattagctcttctttacgatattatccaaaatgtaagaatataaaaagtaagaaatatttaattaaagagaaagttaataaatgagattaattgattttttgcaagccagcaaagatttaactggtcaaacccaattttacttaaaaaaagaaaatgaacttttgccactaagcaaattaagcctcactagtacccattgttatctttattcaggagctagtgcattaactaaagaaaaaatctttaatattgccgctcgaactaaaaataaacaaattaaacttcaaattattattgataagcgtgaatttcccgtttatggcttgcaacttattgtgaacaaacaaattgctattttaatgtaaaaaagaagaccttaaaggtcttcttttagtaaatactactttttgttaggcttcttttcagcttcaagctttttagctaaatctaagatatattctcttaaagcatctttagtttctgggtggatcagaccatattcgattgaagtttcaaggtaaccttccttattaccaacatcatgacgttcgccattaaatacgtgagcaaagacacgttgagtcttgttcatagtatcaatcgcatcagtcaattgaatttcaccaccagcacctggcttttgtttacctaaaatatcaaaaatttcaggagttaataagtaacgaccaataatagctaagttacttggtgccttatcaacagctggcttttcaacaaatgactttacattgtaaaggccattagcaatttcgccatctggagcaataataccatattttgaaacatcttcatgtggaacacgctttacagcaatagttgaagcatgagtttcattataccggttaatcaattgttgagttaaaggaatcttatcactcattaaatcatcgccaagtaaaacaacaaatggttcaccagctacaaagctcttagcacgataaattgcatcacctaaaccagctggatggggttgacgagtgtagtacaagttaacccctaagttagtaatactttgtgttaattctagaagctgttctttatgcttttcttcaagatttgcttcaagttcaggatttgagtcaaagtggtcttcaattggacgcttactcttaccagtaacaattaaaatatcttcaattcctgaagccttagcttcttcaacaataaattgaatagttggcttatcaagaattggtaacatttctttaggcattgccttagtagcaggcaaaaatctagttcctaatccagcggcaggaataactgcttttctaactttcatttgttcacactttcctattttctatttccattataaataatagtatatcaaaattatgtctttataactaacgaatttcaatatcaccatgtgttaattcatcaaatgttgcattaacacatacaccaagcaaaaataatagtgaacttaggttcaaccataacataaaaataataaaggtaccaacaataccataattttcaaaagaaagcttaaaatggcttaaataaagaccaaaaagatatgacaatccagcccaaccaattaaattaacaaaaacacctggccatattgctcgcttacgcttttgtacatttggtaaagcaaagttaaaataagcaattactactaacattacaacaattaatacaagccacttataagtgaagatactttcaatccctaagtaactaattcctaaaaaagcttttacgctatttaaaatctcttgaccaaaagtcagagcaatcgtcaaaagcattaataaaacaatcatcgaaccggtaatcaaaacgactaccccacgttctaataattttctaccaaatgaaaatctcaactcttgttgccgaacaccatagattcgattcatgctaattctcattgcattagttaaagaagaaaatgaccataaagcaattaaaaccccaaatgaaatataaccagtcgattgtttttgtaatactgcttttacaattggcataataaaatctgccactttcgctggaagaccgtagattaagtattcttcaaccactccaggctttaagtgaaatagcggcataatatttccagcaataataattattggaaacatactaaataataaataatacgctataacaattgagccttgattaatctcaccacgcgacattcttttagataaaagcttaaaaaaatgtcgccaatcaaatttcttaatcatctaattcatcaaaatgtggtaaatacttttctaaaccatcataaggcttttgtaaagttaaaattttaggaccatcttttgtaattgcaaaagtatgttcaaattgagcagcctttgaaccatcaggagttacatagtaaacccaatcatcatttggatcatcaactgtcttttgcataattctccagtcaccaccagcttcaagcattggttcaacagtaatagtcataccttcttttaaacgtaagccgtgaccagctttaccccagtgaggaacttctggatcttcgtgaatagtaggttgaataccgtgtccaattaattcacgaacatcaccaaagccattttcatcttcaacataatgttgaataacggcaccaatatcaccaattctattaccaacttgagcttggtcaattcctaagtacattgccttcttagttacatcaagaagtctttgatcttcttcagaaattttacctactggataagtagtacatgaatctgtttcataaccatctaaattacaagttacatcgacactgactaaatcgccttcttgtaaaataagattctttcttggaattgcgtgggcaatttcatcattaacagaaatacaagtaccatatttataaccctcaaagccttgttctgataaacgtccaccccgctctttcataaatttttgggcaaattcttcaatatcccaagttgaaatcccaggtttaatcacatctcttaatgcttcaaataatgaagcaagtaaacgacctgatttttgcattcctttaagttcacgagctgattttaaagtaatcaaattattgtctccttcaataaaaaagtttaatacaacttctattatagccttattttcactttaacaaaaactattctccaatactttttcattataaaaataaatctttttctaaattaagcctacattcgaaactgtcaaattttttgtgtaaatagatctttctcgtaaattgtttttttaacgttttatttattcaaaataggattctaaggtatcctggacttgaccaaagcctttgtgaattcggttgaagtagcggtcattgtagctcattgcttggatgccaataaaagtatcaagcgactgttcagtcgggaactccgctttaggcttagccttgcgcttaatgacgttattaaaggattcgatcatgttggtagagtaaattgaagccctgatctgcttaggataattataaaaaacaagcaggtctggctcgatgtctttcaggtttctaatgacacgattgtagctcttgttccatttggcataaaaagcatgcaatacatcaacagcagccgctttattggcttgctggtgaatctgcttgaattcgttcatgattgcctcgcgatcgtccacgcgtactttagcgcagatgttgcgcataacatggaccaagcagcgttggaaatgagcttgaggataggtctttgccagtgctgctttcatgccgacaacgccatctgaaaggaaaagctctacttgctttaaaccacgagatttcatgttctggagcaacgccgtccagacttcaatgttctcactaggcgcaatgcagtagtcgataacttccttgtgaccattaggcttgatgccaatggcaatatatactgcttctcgttcaaaagtttctcgacgcaacggtatatacgttgtatcaagataaacacaaaagaacttatcgctcagcttacgcttgtgataagcctcaactttaggaatcatttgcttagagatattagacacttgagctggactataatgactgccatacattttttcgatcaaattagctatttctctagtggttacacctttagaataaagctttataaccatatcttctaagagatcagtatgttgtttatagtctggcagagtgtgttgatgaaacataccattgcgatctcgtggcacttgtacctcaattgatccaaactgggtatcaattttacggaaatacgcaccatttctagaattaccagtattccagccatttctagcatagggatcatatcctaaaaaggcagtcagttcagattctaacatgtcattaacagcttgttggatttcatgacgaagcaaatcattaattttatcttgattgaatagagcttgagttatatttttggtaaaatcattcatgaaggagttcttctttctgtatgttttttttgttcaaaccaatcatacgagaaaggaactcctttttctaatgttttaggaaattaaattaaggaataattcatccttacacaaactattttacggtctcctacattcgcactctagtattaattcttaagttataatgtgctaaaatttaacagttagtattaactatttagaaaaggaataaaatatgcaagtaaaaattgtctatgccagtatgactggaaatgacgaagatatggcagaaattttagaagaagaccttcaagatgctggctttgaagtagattcaagcgatgtttcttttacagatgcaagtgattatttaaatgcagatatctgtgtttttgttacttatacatatggtgaaggtaagatgactgatgaacttgaagatttttacgatcagctaaagagccttgacctaacaggcaaaagatttttagttatgggtagtggcgataaaacctacaaagaccactattgtgaaaatgtttttgactttgaaaaggtatttttagcttgtggagctgaagaagtagtcaagcctttaacagttgaaaatgcacctgatgatgatgacattgctaaaattgatgaaattgccgatgaattagctgaaaaattcaatggttaaatctgatcgcaccctactacgtaaacaggggcgcaaattattaaggcggtatagaaacttatatgtttatatgttcttcggcttcattgccgctttaattaacacaatcgtttttgtcgttttacacaataactttaaagtagttttagtttttgctaatactttagcattcatcatctctaacttagcctcattttacttcaatcactatgctgtttttactcatcatgttgatacaagtaagtcaatatggcgtaagttagttgccttttttactttttagaatcatcagtatcatccccgataccttaatcatgttagtaggccttagtgttcttcgctggaatgctgttttggttaaattaattgatcaattattagtaggtatttttaactatttaactactaaagctgtttttcaaaaaaacgaccatcttattagagagcgaattcggcaatacgtaatcgaatcaaaacaaaagaaaaaggaccgttaaaggtccttttttcttttgcaatatatcaactaacttataaactttcatgaatcattttaatatgaggcgttgattcaaaaatgaaaggcgctccaatagtcttaaagcccacttttttgtaaaaatcttgtacctgttcttgagattcaatttcaatttctcttcctgggaagttctcttttatagcattcatgattttctttaataacttcatcccatatccctgacctcggaccgcttcactagtaactactcttccaaaagaaacatgttttccatctaaaaagacccgagcataagctactattttatcattttcaattgcaaaaacatgtaaagcagagagatcagttttatcaatttcatgataaattcgtttttgttcaacaacaaacgtagaaatgcgtaaatccaatatttgccaaatttcgtcaggtgttaattcattccatttcttaacgtaccacataactatttttcctttctttcaaataataattgatttgcatgcctaatactctcataaaattctatttgttgattatctgataaattttcaattaagttatttatttgatcattcgaacgaatatcaattgatttatatgcttcacagcctttatcagttagaactaatttaatagagcgtcgatcttttgaatcagggattttttcaattaaccttttcttttctaattgactaattactcgactagtatagcctttatcaatctttaatttgtgtacaatttgaattggagttatttcatcttcttcagcaattttctcaagaattctcccttcaggccaagataaatccgttttaaaaatcttcttattaagtactccaagtgctattacatattgtcgattaaattttcgaattatatcaatttctttattgttaagcattggttatctcctataaatagttgcttttgtcaactctttttgcaaactaaaaaggctcaatttcgataaaatgtcgaaatcaagccttaaaatacatattttagaaatcaaaatctagctttaaaattactttattcaaattctgctgggcgtttagtattggctttatcaaagtaataagcaatcgcatccatgattctgtcacttgcatgaccatcaccatatggattcttggcattggccatttcttcataagcagccttatcttctaaaagcttaaccatttcagttcttactttatcaacttcagtacccactaacttcaaagtaccagcttcaacaccttctggtctttctgtagtatcccgcaaaactaaaactggcttaccaagtgaaggagcttcttcttgaacaccaccagagtcagtcataataaagtaacttctttgcgctaagttatggaagtcaacaacatctaatggatcaatcaaatgaattctagaatcgccacctaatacttccttggctactgcttgcacacgtggtgacaagtggactggataaataatctcaacatcatcgtgactatcaaccacttgcttcatcaccttgaatactcggcgcattggttcgccttggttttcacggcggtgcatcgttactaaaatcacacgattacctggcttaatttcatctaaaacgtcatgatggtaatctttttgaacagtttcatgtaaagcatcaattgctgtattaccagtaataaaaatattatcttctggatgactttctttaagtaaattttgcttacttaaactagttggcgcaaaatataaatcacttaaaacgtcagttaattgacgattcatttcttcaggaaatggagaatatttattccaagttctaagacctgcttcaacgtggcctaaagtagtttgttcataaaaagttgctaaacttgcagcaaatgaagtagtagtatcaccatgaactaaaacaacatcaggcttttctttttttattgtatcagtaagcattgtcatgaccttagttgtaatatcagctaaagtttgattcttgtgcataatattaaagtcataatctggcttaatcttaaaaatatctaatacttgatcaagcatttccctatgttgggcagtaacaacagtcacttcttcaaagcgcgcatctgacttcaatttcaaaacaagtggagccatcttaattgcttctggtcttgttccaaaaacagtcattactttaatttgcttcataaaattacctccatcgcgttaatacctatgatacgctattaataagttattgaaaagaagggaattaaatggatttacgatttctctatttattaattagtggctttttaatcacaattggctctttttgtgtagtatttggaatagctgaaaaaagcaatttaaaaaaatggattttaatttcaaccggattattttgttggggaattgtagcaattttacttgtcgtaaaaatcgtacgttattaaataataacactcttataattcttgttttatatcacatttttgtaaatgttattgtgttttataatgattagtaataaaattatgaactataaatccgggtttatttatctataatacataatcagttcttatgataataagaacaattatagaaagaagtattaaacatgaataaattagtacgagataaaataccagaatttgtaactaatgcaaaatttagaaaactcaaccaagacgaaattcttccagcactaaaaaataaaattgtagaagaagctaatgaagtaaaagatgctacaagtgaagaaaatttaattgaagaattggcagatgtttatacagttttaaaagcatttttagattttaaaggaattactgaagaagagttattaaaggttgtaaatgataagaaagcatttaaaggggatttttctaagtttttatttatggagaaaagttagatacaaaaaggttgatattcttcgtttttaaacgtagacaatatcaaccttttttagcataaaaatatgaccacggccagaatcgaactggcgacctactgtttaggagacagtggctctatcctactgagctacgtggccaaggtacaatataactctatcatacttttacttattgtacccaacttttttaatattcaaatgaaaaaagattacgtttttcttgctcttttgctatcctttcaccagccaaaacaaatggtaaccaaattaaaatcgctactatcatatttagcgctactaaagccaatgccctccaatcataattggttgctaaaaaagcatttaaaaatggcggaataacatttggaacggaagttgaaactggctcaactaaatgccaagctgttgcccaataggccaaggtaacgttagctattggtgctaaaataaatggaattaaatatactggatttagaaccaatggcaatccccagactattggatcatttatattaaaaaatcccggtccaatagctatcttagctaaagttctgaaatcacttcgttttgaaatcagcaatattaacagaattaaaactaaggtatccccagttccaccaatccagctatagatgtcaaaggaatttctagtccataaataacgaactgcatgtcctgactttactgctgccaaatttgcattctgaggagtaagccatattgaatcaataactggtactaatacactcatcccattaatgccgaagaaataaaacgcgtgtaataaaaatgtgattaataatactattccaaagccctgccccattttagtcaaaggattttgaatagtagttaatagccaatttccaaaataagttccagttaccatttggaaaatataattaattgccccaataacactcaaactaataatcatcggtatcaaggcaataaaagcagcttcctcagcatggggcatatatgaactaaatcgcaatgttaatctagctttggtcattaatataaaaattgctagtccagctgctccaaaaataagtgatgtaaacaaccctaaactcgaaagttggctagtattaaaagcattttttattgaaacttcatcaccattgagatttaatttcacaacattagctatgctcatcaaataacagcctaacgatgttatcgctccagcaagccgattaacttcaaagcttctcgctaattgataaccccaagctaaagcaaaatatattgaaaacagtttaaaagtaccttgataaattagattggaaatattaactaccggcattagagcatatgtaatagctcctaagcctaattccgctttagcagcattaattaaaccaggaattaataccgtcaaagaacccacaatactgattggcattactgaaataaaagcatcccttaaagcaactaaccaacgccacttggccatagtagttgctaatggaagtacccagcgctctaaaaaatagataaatctttttgtaattcccactactttttctcttttctgggatgatatcccttatttttttgatttcttttacgctttttgtgatgctttttcgctttcttaacttcattagaaacagccttttctagttgtttcttttctgtctttttaggcttttcagttgataaaccaaatcctttaaaatagacttgctttaaatcaatatccgaaagtaatttacgcatatcccgtaaatcatgatcatcacccaaggtcacaacaaaaccatcatggcccattcgtccagttctaccggcacggtgtaaatacgtgttttcatcttcaggcaattcataattaaccacgtaagttaatttaggaatatcaagaccacgtgctgccaaatcagtcgctaaaagcaaacgtgttttaccagcaactaaatcattaatagctttttgacgtctagttttaggttgattatttgttaataagtcaaatttagtctgtgaatggctaaaaattctagcaaatttttctaaagtttcattagaatcaaaaaataagattcctttaaagccatctaactttaccaatcgttgcaagaattgaatcttataccgattagttacttttaagaaatagtgttcaactgggcttttttgttctggtcgaacatcaatcaagaagaagttagttgcaaataactcttcagcttcttgagttacgctactttcagttgccccaaataaaaccacttgactagtagttggtaaattttgtcccaggctagaaagcaattccaacttagtaaattctaaaatatcatcagcttcatcaataaccaatttttgaattttactaagcttaatcttattatctgaaaataaatcaaaaaaacgtcctggtgttacaactaaaatttctggcttcctctttttgagttgctcaatttgtctgcttcggttaccactacctactaaagccaaaacattcaaaccaagtgctaaagcatacggacgaatagcatttctagtttgaattgctaattcagtagttggttcaaaaatcactacactcgcatcatcgccaggcttagtagtttctaacaaaggtaaactgtaagccaaagtttttcctgttcctgttttggctaaccctataacatttgaaccgcttttaagactttcataactagctttttgaatcaaagtaggattaatttttccttctttattcaaaactgtttgaattttttctgaatacattattgtgttaaatctccataaagttgtttatattgacccattgtaccgttatatgcatacatttcaacgtcatactccattgcttctacattctttacatgacctttattcgtatagcgccaaaacgcatattgtaacttattcggggcccgattatctgtagacataaatttagtggaaattgggaagtattttttgtatttaatacttccttgaaccataacactttttccatctttcaaaaataaagtggctaattgccccatatgtttccaaaaagataatttattactattactccccggagcagcttctagcaaaattggcagacttccagtgttagaattggtctttttattaaaatatctatactgagccttaacagttgattcatcactaaaatatagaacacttccaaaagctaaattagttccctgaatttgactgcgataacgatcatactcatcatcaaaataagatttcccttgtgtagctcgtaaatagacgaatgaaattcctgctgcttgcaacttgtgtaagtcaaccgagtcgcgatattgatcaagcttgaccccaaccacacttaaatttgaaccagttggcaaggttgttcttttgggtaatgaacgatatgcaaaaaacaaggcacaaattacacaaatgagactaataataattaatggtaatgtagaacgatgtcgaaaatgtggcacaataaatcctcctagaaacattttaaccaatatttctagctataccaagactttgtgtggtttatctagtataatttcaatatacttcattattaactaattaaaagaggagaaaaaattgaaaaaagaaattacctttgcccaaggcctcgcaacactagttggtagcgtcattggggccggtgtattttttaaaataggaacaatcagtcatcaaactaactctgctggattaacaatatttgtctggcttttggctggatttttatcacttgcatctggattaactatagcagaagtcgctgcagaattacctgtaaatggatcaattcaatatttagaatacacttatggtagcatctggggctttctattcggttgggcgcaaattattgtttacttcccagctgaagctggggccagcagctcaatttttggtacgcaagctagcaacctctttggaaataaaattgctgctctaccaatttcattgtgcatgataacttttattttcttgactaatcttttagggaccaaattttcaagtaagttacaatcaattgttactgtcattaaagttatcccacttattttaatcatcatctttggcttaatggctcctgaacaacatttcagttttactagctttgcttcaaaaaatgctgttcctttagtaactgctattagtggtggtttactatctgctctttttgcattcgatggctgggtcagcgtgactaatttagctggagatttaaaaaatccccaaaaagatatggctaaaattctaatttggggattgggaattgtcactgcaatttacgttttggttaactttgtatttttaaaaatattgccattcaacagtattttcggtaaccaaaataccgcttttaatactagcattaagctatttggcaatatgggtggtaaactagtcacaattggaattttaatttcttgttatggagcagctaatgctttcatgcttacaggtatgagagctccgtatattttagctcaaaataacttattaccattttctaaaaaatttaagcaagctaataaaaaaactggtgtacctgtttggggagcagttacaatctggattattacaatgctcatgattagtttaggtaatttcgatattttaacagatatgctggtattcgtaatgtggttttttacgattatgttaacactttgccagcctgttttacgtcgtcgtaagcctaatctcaagcgaccatttaaagtgccattttatccaattacaccaataattgccttagcaggtgggatttttatcattataatgacaatcattaaccaattctggttatcattgattggatctgggcttactgcattgggactgccaatctacttttataagaaaaaacagaataagtaataaaagaggctgtatttcacttcaccgtgaaatatagcctctttatatttatttatttgcatatgcttgaattacttcaggctttacgacgccgatgtatggaatatttctaaacatattgtaaaagtctaatccatatccaacaacgaattggttttcaacttcagagccataataatcaactgatacattatctactcttcgtgatggtttatttaaaagtgctacacacttcacgctctttgctcccaagcttataaaatgttctttcataaacttcaaagtatgaccagtatcaacaatatcttcaataatcaagatatccttgccctttacatcagtagtgacgtctttaactaatttaacttttccagatgattctgtaccattgccataactagaaacatcaataaagtccatcttacaacgcacatccatttcacgagcaagatcagtcatgaagaaaattgcaccagttaatgctcctactaacactggttcttttccagcataatcttcagttaattgcttacctaaccggacacacatttcgtgaatatcatcacgactaaataaagtactttctaaaatatcttcgatattatctctcattactaacctatccttgaatccttatctatcaatactatttaaattaataataacaaaaaaagcactaatttgtcagtgcttttttatgaatattattccgtagttttagaattatcattcagtttttcaacattgaaccatctcatgaagccttgctcaatttcagcaacttcaaatttatagccttcaacagttacactatcaccttttttcaaatctggatagtgttccatcatataaccaccaattgtgattatatcgctatcttgaaaggctttaagctttttatgataaaatctttcaaagtcatataaagtggttttccctgaaacacggactttgccatccttatctcggataatatattcatcagaaacgtcatcgatttcatctttaattgatccaaaaagctcttcataaatatccttatcagtaacaatcccactagttccaccatattcgtcaacaactaaaacgattggagtatgtttttgaatcattaattgtagaatatcttgaattggcattgattctggtactgtaatgatagcacgaatcaatctacttaatgaagcattatttccctcattgctctgctctacaatatcgtaagcataaacataacctacaacatcatccttatcattatcacgaacaacagggaatcgactaaagccttcatccaaatataattttaaagcagtcttaacagtatcagtagcatcaagaacagttaatcttgttctatcagtcataatatctttagctactttatcatttaactcaaaagcccgctccatatatttcaagtcttctttatcaagagcaccacctgttacagctaagcgtgataacttaataatttctgactgtgaataaatttcattttcttcagctgcttccttaaagcccattaactttaagacaccattagagctagtattaagaatccaaacaaatggataaaccaaggtatggaaacatttaagtggagttacaattaccattaacatttttactggcatatcaatagctatatttttaggaacaatttccgtaaaaacaacttctaaataagttaacagcaatacgcccagtactgccccaatagatttagctaaggattcactaagtggactaatttttaatcctctaatgataagttctgatagagtatccgtggagaaccaacctaaaacaaccccaactaaagtagtacctacttgtgtggttgatagatactcattaaggtttctaaccatatgcaaagctcgtttgagctttttcaaatttccttctttgttagcaatcatgtcttcaagctggctaggtctcgtctgaacaagtgcaaactcggaaataacaaaaaatgtagcaaatccaaaaataataagtgtagcgactaaattagtcactatctgactagtatccaatttttatatcacctttaaaaataaaaattataataaactatttatattttaccattagctagacttttatttaattaatttgaaaattttatcgaatggaactctaccaggaatataagttggagaattcacctcagctgctttatcagcataaccaatcgcaatagccataccaattgcttcatcatctggaatattagtatattttctaattaaatcaggatatgcaactaatgaatgagctggcatcgtatcaagcccgcgattaattgctaaaagcataatactctgagcaaaaatacctaaatcaaaaactgaccatgctggtgatttttttggtattgtcaaaaaaataatcgcaggagcataaaacatgttattattggcattctcaaataattctgtcttattatgcaaaaagtaagtaacaaaagcccccatattagacatgttttgactaggaaaagtagaccaatcaattgacaacattgttgaaaagtcttcactaacaggaactttacgtgcaatataagctttattttcacgtttcagttttaataaagcgcctccagtaattgcatatgctctccatggttgggaattaagcaatgagggagattgttgagcttttttgataatctctttgattaactcatcatcaaccttgcgagttgaaaatttacgagttgcacgctctttattaaacacctcttcaaaatccataatatatctctccaatcaagttacactttcaacttatattataagaaaaatgattgtagtttactaatattttcatcaacaaaaaagcgcctgaccaaaagtcagacacttaatattttcagacttagtttaagcccttccattcccattcagtaacttcaggaatatctttaccattgtcacgaatgtatgtgtggtgcttagataaaagcttgtccatttcatcaacaaagcctgcagctggcaagtcaaggcgttctactgcatctttagctaagtggaagcggtcaatttcattcaagacccgcatatcaaatggagtagtaatgtcaccattttcttcataaccatggattgaaacattatggttgtgacggtcaaaccaaattgattccatcattggcttaaagccatgccatgcaaagataactggcttattcttagtaaataagcgatcaaattcttcatctgacaaaccattggggttcttacgttggctttgtaacttcattacatccaagacattaatataacgaatcttaagatctgggaagttcttatgcaataagtcaattgcagctaatgtttccaaggtaggttcagtaccagttgaggcaaagaccacatcaggttcttcgtgatcatcagttgatgcccaatcaatgtagctaagaccattttcaactaatctttgagcttcttctttactgaaccattgtggacgaggttgctttgaagttaccaaaacattgatacattcacgatctgcaaaagccttattacttactgcaagtaatgagttagtatctgcaggtaaatattcatgaattaaatctggacgattcttttcaaagaggtgagttaacaaacctggatcttggtgagtgtaaccattgtggtcttgttggaacacagttgaagtatcaacgatattaagagctggatagtcatgtctccagtattgttccttagcctttcttaaccacttcatgtgttgagtaagcattgagtcaactactcggccaaaggcttcataagttgcaaagaagccgtgacgacctgttaagacgtagccttcaagccagccttctgcttgatgttctgataattgagaatcaatcattctacctgaacgagctaagtcttcatcatttggttctttgatatcttccatccattgacgcttttgaccatccaaaatagtaaataaacggttagacttagattcatcaggaccaaaaccacggaaattagttgggtttaagttagcaatttcatttaagtacttagaccattcagccatatcttgcttttcaacactacctggcttgtcaaaatcaattgcgtaatttctccagtctggtaaatgaagacgcttaggattaataccaccattagtaactggattcattgccattctttggtcaccttgaacagtattttcaagcacaatatcctttggtgagccatcttcattaaataattcttctggcttgtaactcttcatccagtcgataagcatatccttgtgttccatatgcttttgatctacaggaattggaatttggtgggctctaaatgaattctcgattgggttaccatctaggtcaaacttaggaccagtccaaccttttggtgcacgcaagaccatcattggccattgtggcattgaatcgtcaccagttacacgagcatgcttttgaatagctaaaatatcttcaacagccttatccattgtcttagccatcaattcatgtgcatccatatgacttaagccatgaacgtttacaaagtatggcttccaacccatgccttcaaagtatttagttaagtcagcatcgctcattcttgaaacaattgttgggttagaaatcttgaaaccattaatttgaagaattggtaaaactgcaccatcgtgaattgggttaatgaacttatcactaaaccaactagctgcaagtgggccagtttcactttcaccatcaccaatttcaacggctgcaattacatcaggattatctaaaattgcacctacaccatgtgaaagtgagtaaccaagttctccgccttcatgaattgatcctggagtttcaggagcagcatgtgaagctacaccgcctgggaatgagaaacgtttaaataagcgggtcattcctgcttcgttttgagtaatttctggatatctttcggtatatgagccatcaagatatgagttagaaaccattacttggccaccatgaccagagccttcaatgtaaaacatgtttaagttatatttcttaattacacggtttaagtgagcgtaaataaagttttgtgggacaatagttccccagtgaccaattggcttaggcttaacatcttcagcctttaattctgtctttaataatgggttcttcattaaaaacaattggccaactgataaataattagctgcacgccaatatgcatcaacacttcttaagtagtcttgtgaatcaaaattaactgtcattttagttctccttttaaggaattaaatttcttttttacacttatataatacccaactttttgcaaaagttcaacttatttaataattggttgggtccaattttaagtataaaaaataaggtcactattggccttattcttattggttcaaattaacaaaactgttatatcgcatatatttataatgaattcgcatattagacacttcaaatggagttccatcatctaaaaagaaaattccctccataacacctactggttcattagtttgcaaatccagttctgattgatcttctgaattagaaggttcaactgtaatattcaaaaacgatctagtaactgttttgttttgagtatcttctaaataattaaatagcgaatcttttaaaatttctggagtaagttcagggacaatttttattggtaaatacccagtttcgattaaaaatggctgattatcaagtaaacgaagtcttttgaattgatagacaaagtcggcttcattgataaataagtcttgagctaattctttgctagcattaataactttaaactctagcagcttaatctgttgctttttgccaggaactttaaaactatcagttaaccctaagttagagccttcatagcgaaataatgcttgattttttaaatacagtggattaataaaagttccgcttccacgctttttgaaaataataccctgttgtgctaataattccaacgcccgcttcattgaagagcgtgaaacttgatagtgactagccaagcttcgctcatctggtaaacgcatgtcctcatacttttgagcgagaatattttgcttaatatcacgcattacagcacgataaacgaaatctgtcatttcaatcttctctctttatttatctgcttcttttaaaactttagcaaaccaatctacaaattgttcacgattaattgatacaccaatttctgcgtttactggcttaccaaagaaattatcaaaatccattacactagcaccataagtatacgaatcatttgtatcaattgctacaaaagcaggcttaaaagtatacatttctggtgctagtagcatccctactgccaaagcatcataaatctcaaggccatctgacaaagtgccatcatgcaaattagaaagaatggaatacagcatttctccagtttttccataatttttaactacatccattgtatcttgcttaacaaaagcttgatgacctagttcaagaggtgcaacgcgaatctttacaccactttcaaaaacaatctttgcagcttcaggatccccactaacattatactcatcatatggtccataatttccgctgccaattgcaccacccataataactaattcttcaattttttctaaatcatctggatattgtctaaaatacaaggcaaaatcagttgctggtccaatttgcatcaaagtaactttttcagggctattagcaacaacttcatgaattttggtagctgctaaaccagaaaccaataatcctttatctggttctgggaaatcaaatccatccatcccacttttaccatgtacttctgatgcatcaattggtttctttactaaaggtagcttagcaccagaaaccacgggtactttagtacccaaaaatgtttctaattttagagcattattcaaagtcttttctaaacttacatttccccatgttgccgcgattaacttaacatcaagttcctttgcaaataaagcaattgttaatgctactgcatcatcaataccaggatcagtactaataattaatggtttcttattcattgctttctccttcaaaaatcttttaaattatcatatcaaaaataaaaagacaaagataattatctttgtcttattctaaaattaagttaaattaacgcttaatttcttgaattgttccattacttttagcgacgattacttcatcacaaatacctaaaaataagccatgctcaacaacgccaacagtatgatctaagtaatctgccaaaccatttggaacaggaattgggctaatatttaaatctaaaatataattaccataatgtgtagttaattttttattgccatccattctaaattctggatttagcccttctttctcaagtcgctttttaacttgcatgcaagaaactggtaagacttcaactggtaatttgaatccagataaatgatctactactttactttcatcaacaatccaaatattcttttttgaattgacagcaacatttttttcgagtgttaaagctgcaccgccacctttaataccgtttaattgactatcaacacggtcagctccatcaacagttaaatctacttcatcaacatctgccaattcatctactttaaagccataactttctaattgcttttttgaacgactagaagtagtaactatatgtttcagagttaggccttctttttcttttcgttcacctaaccaatcaataaaaaactttaccgtagaaccagttccaacacctaaaaccgaaccagcttgaaccttgtcagctgcaactttagcagcttcttttttcagttcatcttgcatatttttatccattattctctccccattaattcattaacttcgttgtaagtagggatagaaggctgggcccctaatctgctcacagcaattgatgatgcacgagctgcaaaggtagcagcttgttcaatatttgaaaaatcagcctgtaattgactcgttaaaaagccaataaaagtatcgccagcaccagttgtatctgctgcttccactttaaatgctggaattaatttttcaacattagcagttgaaatgtagctccccttatcgccatatgtaataactacatttttaactcctaattcatgtaatttatcgctattagccttaattgattctaagtccttaacttcaattcctgtaattaggctactttctgtttcattaggtgctatcaaatctgttaattttaatagctccttaggaagttccttaattgctggggctggatttaaaattgtaattacattatttttcttagcaattttgaaagcttcaatagctacctcaattggtgtttcaaattgcgtaataattgcatcactatctttgatcaattcttctgcagcatcaatatcttcaacacttaattcataattagcaccatggtcaataataatattattttgaccagcctcatttaaattaatgtatgcatgtcctgtattagtaccagaagtggtttgaacataagtagtatcgaccccatagcacttcaactgctttaagataaatcgcccagatgaatcttctccaacacgattaataaagtaagtttcactccctgctttagcagcagcaatagcttgatttgctccttttccaccaccggcttcagtaatatctaacgcgttaatagtttcaccaggctttggaaaatctactacatggagggtggtatcaacattacttgaccctacaacaacaatcttttgcatatcaatttcctttcatgaaagcggttaaccatattataacctagttatcctaaaattaaacaataacttaagttaggctaattccactagtgatgaacccctttaatctagctgcttcccattcaagagtttcatcatcatcaacttgggataatttataaccaacaaagtaaggtggcgcataaaatcttggaataactttacagcatgtacccttaccattttttattggatagaagaataaattatatgaatctaccccgtgtgacaagacacttcttacatattgagtggatttttgaattaaatctgcccaaatatctaagtcttgattatgccaggtaacaacattgacttcttgataaccttgaacaggtcttttagacaaattcatttcaacgtccccacttttaccaacttcaaagccagtaaaattattttcttgtatatttttatagccatccattttatcaagtcccacaatttgcatgtgaggatgttgcaatgaaccatcagattttggtccaaagtttttataccaaagaacactctgataatcacctgaattatacatcttttggaagcactttaagccaaacttcatcaactctcgattttcttctctagtataagttgaaatgtcaccttggtgatcacttgattcaattaaaatagtctgcattgtgtcttttaaagttggatatttattatgaagccaaattttgtcaccatctgtttcgtaaatatcagttaatgtttgaggattacaaaagggacacggattctgtgtattactttgccgatttgcataatcgtagtcatatggcttccgtttcccaacagaatacatatatactaaaggttcatcgttcataaattccacctcatttttctgaatgattatttaattagactattccaagttcgaactttttgcaaattctttacaatctaatcttaaattagtaatagaccccggtcaattaagaacattgcttctataaatatcgaatttaagggtaaattatgataaaattaccatgtgtttgttaatgttttaacacagttgattttttgtttgggggaggatcccattttatgaagtttaaaaataaagttgctctagccgcaatgctaggggtatcattgttagctactgcttgttctactggaagcaagactcccactagttcaagtacaattccaactaaggttaccaaaaagaccaccattactttttggtattctttaactggaacaagtaaggcaacacttgaaaacttgactaaggaatttgaaaagaaaaatcctaacatcaaagtccaattacaaagtcaaggtggaaatttaggtgatttacaatcaaagttagtatctagcttacaatcacctaagaatttaccaactattacccaagcatatccaggctggctatatagcgctgctcaaaacaaaatgttagttaaccttacaccttacgttaataataaagaaattggttggggttcatattctaacagtaaaataaaatctgctctttgggatggtgctaaaattaacggtactcaatatggagttccatttaataagtccgttgaagttttgttttacaataaaacgattttagataaatacggtgtcaaagtacctaaaacaatggctgaattaaagaaggctagccaagaaatttatgaaaagagcgaacataaggttaaaggtgtgggctttgactcacttaataactactacatgttggcaatgaaagaaaaaggcattgattttacaaagaagttaaattttgctagttctgaatcaaaggctgttattaattactacgctgatggcgttaaagacggctactttatgatggctggtactgaaaaatacatgtcaacaccatttagttcagagaaagttgccatgtttgtaggttcaaccgccaatgaagcttacgtaaaaagtggcttaactcaaggaaatgaatatggcattgctgcacgtccaagttctataaacgttcaacaaggtacagatatttacatgttcagtaaagctactaaattacaaagaactgctgctttcaaatacctcaaattcctaactagcacggcaagccaagctacttgggctaataaaactggttatatgccggtcaatactgatgttttagattcagcaagttacaaagcttcaaaaaacagtaaagttcctgcaattttggaagcaacaactaaaaagctctactacttacctataactaagaactcagaaagcgcctatgaccaaatcaacgctaatatgcaaactatcttggcaaatgcgggcaagaagaaatcttggaacagtgacattactacaggtcaaagcaagttaattgctgcttggaaacaataattattaaaaagaataagaaataaaatactaataaacacaaataaaagaaggttggaaatccaaccttcttttttactaactataaaaattaagcattcttcaaaacaatcttttcaacacttgaggcgacgtcctcacaagcatcgtgacatcgctctaaacaattaaagatatctctccaaactaatacttgtaaagcatctttttcatgcacatgtaagttacgcatattatcaataaacatcacgtcagcttttccttccatcgtgttgatattaacaatatgttctttaaattcggcattctttttgaatttgggcaagtccttaattaattccacaacttcatttgtattttgaatcaataattcacaaattggcaaaatttctggtcgaattgtttgaatgttatcgcagtataagcgcataagtacatcttcaattcggtcaaccatattatcaatattatgggctaattccataatatcttcacgttctattggtgtaacaaatgctttgattaaaacttctgtcatttcatgtttttcatgatcggcattatgttctatttcatgaatcttgtctgtcaaatttgatactcgatcaggtgtataatcattaactacctcattgagcaattgactagcttcatatgcaaaattggcacacttcaaaaatgtatcaaaataatattgatctgattttctactcattttttctatcctcttaaaatactaataaaaataacttcgccatcaaaaacgcaataagtccacatcctgggaaagtaaatatccatgttaagaccatgtctttaactacattaagattaatagagctcagccttttaaccgctccaactcccataattgaactagttttagcatgcgtagttgaaattggaataccataaagagttgatatcaggatactaattgctccagctaagtcagaagaaaagccttgaaatggttctaactttaccatgtccattccaacagatttgataatcttctctccgccaacacttgtaccaactcccattgtaattgaacaaagcatcattagccaaactggaattgctatacttgcagcactagcatgtccattaacaaatgccattcctaataacaaaacgccaataaacttttggccatcttgagctccatgcataaagctcattgcagctgcaccagcaatctgtgcaccagagaagaagcgattagtctttctacgatccatattttggcaaattagaataacgcatttacaaatgatccagcccaaagcaaaacctaatactaaacttaaaaccatcccatacaagactttaatccattcattccaatttatccccttgaaactgccttgaattgcaattgcagctccagttaaaccagcaatcaatgaatgactttcacttgttggtatgccaaagattgaagctcctacactatagactacaatcgagaaaagtgctgcagctaaggcaatcattgaagcatgtgcatccccaccaaaatcaaccatatttgaaattgtttcagctacacttgcattcagctggggcataattaaaacgcctaaaaaattaaaaacagcactcatgataatcgccggtttagctgccattccacgagttgttacagttgttgcaattgcattaggcgcatctgtccagccattaacgaagataactcctaaagttaggacgactgtagtcaacattgctggatttgctaaactttgcaaaaagccacttaaacttatatccattcttctctacctcaaaaaatacttctctaccttttttacacaaaagcgcttacttagtcaagcagaaaaaaaggccatttaggcccccttccccaatttctttctaagcctttgagcaaataatgataaggcaaagcacacaacaaaatacattgttgcaattattaaatacattggaatcatataagttgtattttgactataaataatttgagcatgatataaaagctctggcaaaatgataattgttgctagcgaagtgtccttaactaaagaaacaaattgagatagcaaggctggcatcatcatatgcattgcctgtggcataatgacatgacacattgcttgtaagtaagtcattccattacttctagccccttccatttgcccttcagggacagctttaataccaccacgcacaatttccgccagcattgctgactcaaaaatcactaatgcactaattgctgcccaaaatggtgttgcatgtatacctaattcaggaaagccaaaatatgtaaagaaaataattaatagcaatggcaaattcctaataatatcaataataagtccaactactgctgagatatatttaatcttcatatatctaattgttcctaaaattaagcctataatgtaacttaacacaatagaaataatcgatacctcaactgttaccagcaatccttcaagcaaaaagcgcaagtttgtaggagagtatgcattaataaacgtagacattcttttatccctcctaagcaattttcttttctaaatatctcatataatagctgagtggtaatgttaaaactaaataacaacatcccacaactaaatatgtattgacggtttgaaaacttgaaaaagcaattacatcgccttgatacattagatcaaaacctgctacgaatgctaagacactcgaattttttatcaagttaataaattgatttcctagtgaaggaatagctactttaaaagcttgtggcaaaataacaaaacgcatggcttgcacataagtcatcccattgcttcttgctccctccatctgaccttctccaacagaatttataccagctcgaatacattcggcaataaaggcagaggtgtataaggataagcctatacagccagctgtaaagccagatatcttaaataaatattggggaactatcaaataaaagatcatagtaataaccaataatggaatatttctaaaaagttcaatataagaatgagctattatttgaacagttttatttggtactacttccataattgcaaaaactgtccctaaaactaatgaggcacataaactaattatgctaatcatgactgttacgccaaatccagaaagcaggtttgaccaattattctgcaaaatttcaatcatctacttgcctccttaatgctaaaacctggtataccactgaaccattttttaagtagtttttgataagttccatcagcctttaattctgctaaggcttgattgatctttttacgaagtttagtatcaccttttctaactgcaataccataaggttcactagtaaatgttcctccaactatcttaaagcccggattttctgccgcaatcccagctaaaataccattatcagaagttaaagcttgaccctgacctgctttcaaagcactaaaagcctgtccataatcatcatattcagaaacacttgccttaggtgcaaattttctaatatttgcaactgccgtagttccttttactgcaagaaccgtaattccatttttattcaaatcataaacgtttcttattttactattttggggtactaagattgcttgccctgcattaaagtagggtgttgaaaaatcaacaatctttttcctttctttagtaatcgtcatcgtggataaaagtgcatcaacacttccattgcgtaataagggaattttagttttagctgttgtttgaactaaatttactttgatatttttgcccaacattttcttggatagttctttagccaagtcaatttcaaatccttctaactgactagttttgatgttcatgattccgaaaaggcgagtatcagcttttacgccccaggtaattgcttgagaagtttttattttttcataagtatccgaacttttacttttgttttggcaagctgataatgttaaaagaactaacaaagagaatgaagcaaaaatccatctataaaaattcttcattttattctcctaatggctaataactttgcttaaaaattctcttgctctttcagttttaggatgagcaaaaaattctttaggattgtgagaatcttctaatacttctcctttatcaaaaaagagtaatcgacttcccacttcacgagcaaaacccatttcatgggttactaccaccatcgtaatgccagcttgggcaatatatttcatgacatctaatacatcttgaatcatttcaggatcaagagcactagttggttcatcaaacaaaatcactttaggtttcattgccagcgatcttgcaattgccacacgttgtttttgtccaccagacagttgtttgggaagtaaatcggctttttcttccaagcctactcttttcaaaagcttcattgcaatctctttgttttcagcttctggtcgcttcaaaacaatacgtggagctaacataatattttctaaaacagtatggttttcatataaattgaaatgttgaaaaaccattccaacattttttctaattttattaatatctgtttttttatcagctaaatcataccccgttacaattaactgaccactattaatcttttctaagccattcattgttctaatcaatgtagactttccagagcctgaaggtccaatgattgagacaatctctccttcgtcaatttctaagttaatattttttaaggcatgatattttccataatatttatcaacatttctaaattcgataaccgctcccatattattctcctttcaaatattgaaataaattcataaacttattttacctttttttatgggatattaaaaaagttagcacttttacatgctaacttaattcaatattttttctattttaatcaaaagccatttgatccatatataatttataataaaatccttttagattgagtagttcctgatgagtaccctgctcaagcactgagccatctttgagaactatgattttatcagcgttgataatagtttttaaacgatgggcaattacaaagctagttctattctttattacctcatccattgcaacttgtattttttcctcagtcactgtatcaacatttgacgttgcttcatctaaaataagaaaatctggatttgtcaacaaagttcttgcaattgagattaattgtctttgtcctgttgagaacgtatcaccattttcactaattttagtttcataaccattaggtaaacttgaaatataatcgtgaatttgggctttcttggcagcattttctacctcagctaatgtagcatcacgcttaccaaaagcaatattttcaaaaatagttcctgaaaacacaacagaatcttgcagtacaattcccacattatttctaagtgaagttaaagtaaattcgcgaatatcagtaccatcaagcgcaattttcccggcgctaacatcataaaaacgatttactaagttcataatagttgtctttccagaacctgttggtcctacaacggcaactgtctttcctttgggaacggtaacattaattccatgtaatatttctctatctttactgtaaccaaagcttacattttctaaagttaggccatacttcaaaggtgcaagttgctggccgtcaattactcgattttcttccttttcttgttcaacttttgctaatctttttgcaccagttagagctaactctattagattataaagtgaagaaagttgagtaaggggctgaaaatatgagtatgaatactcaatgaacattacaattaatcctaaacccgctggcatggaaacttgcttggctaaaattaaatacgtcccacctgcaattacaattgcaaaatttaaagtagctaatccattcattagaggaaataaaatgcctgaataaaattgtcctttaaacatcgcactacgaactgcttgattatactttttaaattcttcgacagattgtttttgtaaaccattagttataatgacagcttgtccatgtaattgctcgttaacaaaaccatttaaattgctaatttctctttgttgtaagccaatatacttacgagccttttttatcaataccaaagctaaaaacaaggctaaaggtaaagttagcacagtaaaaagagccattttaatgttaattctaaacattacataaatagttcctacaaacaagcttacttgggcaattaattcgaaaatagcctgattcattgcattaaaaatattatccaaatctgaggtgaataatgataatatttttccatcttgatgagtatcaaaatagcgaattgtcattctttgaagcttgttaaataagcttttcctcatagaattattagcatgagcagtaaagttagacattattacccaggaaataaagattgcgagtgttgataaaagataacttgctgcaagaagcgttactatttcaagaaatgaattaagactcccaccattagtaagatacgatgtcaacttagtaacagcttgacccaagtaagttggagcaagtacctgaaaaaaagttgaaatcaagaaaaagacggatactaaaaatatagctttccaatgtggctttaaatacttataaaaatacttaaaagctaatttactatctctcatcaatgctcacctctcatttctctagcctgctgtgtttttaagatttcttgataaatatcagaagtttttaaaagctcctcatgagttccttgggcgactaatttaccgtcatctaagactaaaatacgatttgcattttttatagaaataattttctctgcaattaaaaaagtcgtagtttctttcagtttatgctctaatgcatcttgcaccttcttctctgattctgcatcaagagcactcgttgaatcatctaaaatcaaaattgggctatttgagattattccccgggcaattgatagtctttgcttctgtccacctgagaaattagctgatctttcctgcacttcatggttaaagccatcttgataatttcttacaaattcaaaagattgtgaaattatgctagcacgttctaattcagctttagatgcatctacctttccttgtcgcaaattagaagcaattgtcccagaaaatagaattgctttttgtaaaacgaaagcaacacttttacgtaaggatttttcactaatttcttttaaattgcgtccacctatttttatcgttcctgaactaggatcatatagtctggcaattaactgggctaaggttgatttacctgaaccggtagctccgacaattcctactatttcgcccgcatgcacgttaaagctaatatgttgcaaagtaggctttgtactacctggataagtaaatgacacatcattaaattccacatcacccgataaaacttcatcaggtgctttatcattgaaaactatacttggtttagtatctaaaacttcttttattcttccaagtgaaactttgccccgagaaacattcataagtgcaattccgataatccaaacagcaaataataatgtcaaaatatagtttacatatgggcttataaccgcaatatcagttggatgcagcttaatttgtaggcctatcatcgtagtaactgcacagattgcaatataggcaataattgaaaaagctggaattactgcactcattaaatatccaatattcaaattcaaacggtttaaatcatcactagctgctgaaaatttatttacttgttcaccttcttgattaaaggatttgactactctcatcccgagtaaattttcttgagctaggttggctaccttatctaaacgaacttgatattgttcaaattgttggtttgccaatttcataataaaaagtccaactacagttaaaataaccaaaacccaaagtgttatccaccagaacctaggtatagtcaggatggctaagataaaagagccaaccaaaataattggcaaacgtactaattgcataaaaatactcattactaagttcataatctgattcatatcactaatcaacctagtagtaagacttcctgtactaaaagtatctatatttgcataagaaaagctctggattttttcatatacttcttcacgtaaatcactcgttaccccttgagctaattttgcagcaaaatagacattcaaaatacctgctacaattgcaattattcctaatccaataatccagatactatcagatacaactttacttgtattttcctttaacaaatctttctgaatcgcttcaagtaaccttggctgatataaaacagctagagcagataaagtcattgtaaccatcgccccacaaacatctttgagatactttttcaagtggcgaaacaaaatttgaaacaaactcataatttctcatcctctttaaccagctcccacaaagtgtggctatactcttcaagtaattctgttaatttttctactctttttactcccattttataaattatttcatcttccaaatcaaacaaaggtcccacttttattttggcatagtcaagtccggctttagttaaataacattctttaactcggcgatctccaccattatattcacaaatcaaataatctttctcttgaagtaactttattcccttattaattgattgcttagggatacctgatcgctctactaactctttttgacttaagcgcttatgataaaaaagttcatacaaaattacacttaagtatgttggcaagccattatccatatcccacgcttgataagctcgccctgaattaataattgccatatttatcttttctgtcatttttacgtatttcaaaattagtccctccatatactttcaacaatatattatataatagttcataagtcaatcaaattcttttaacttctcaaaataaaatctagacccctattagtgtaagggttatactagttagagttatgacaaggagaagactatgactgaattaaaacgttcaattgtaattgggattgctggtggttctggttcaggtaaaaccaccattgcccacgaagtagcccgtttaattaatgatgatgatcatatcattacattaactcaagattcatattataaagataatactggtattccaatgagtgaacgtaaaaagattaactacgatcatcctgatgcttttgatatgccacttttagttgcacagatcaatcaactaatgcacagaaaagcagtagaaatgcctgtatatgattttactgaacatactcgcagtagcaaaacaatccacgttgagccagctgatataattattttagaaggtattctagttttagcagacgaaaatttgcgtaatttaatggatatcaaagtatatgttgatactgatgatgatattcgcttcattcgtcgtttagaacgcgatttgaaagaacgtggtcgttcgcttgattcagttatcgatcaatacttggcaactgttaagccaatgtaccatcagtttattgaaccaactaaacgttatgcagatattattgttcctgaaggcggagaaaataatgttgcaattgatatgctaaccacaaaaatgcgctcagtcttggctaatgattaattagattgaattcacaaaaaacggcaatgagaatcaattctcattgccgtttttacttgttttagcgaatcttcttcattctatcgctatatgtatcatcttcaataataaatcttggacgtttttttacatcattgaaaactttaccaacgtaagtacctataatacttaatgtaattaattgtataccacctaataaccaaagtgagttaattaatgaccgataatcactcatatgatgggtaacacctagtaatactattgcgcctccaccataaagcaccattaatatacctaagtataaaataagtttaattggagctatggtaaatgatgttataccatcaattgccaaacctaacattttcttaagaggataatgactttcaccagcaaaacgttcttttcgtttgtaataaactttagtcgtattgaagcctaactctggaacaatacctcgcaagaataaattttcttcatgatattcaagcaaagcttcaacagctcttttactcattaaacggtagtctgcatggtcaggtattaaatttacacccattttggtcatcaaccaataatatgcttctgcagttgtccgtttaaatccagtatctgtatcacgattattacggactccataaacaatatcgaagccttgataaaacttatccaccatttcatagattttctgaatatcatcttgcagatcagcatcaattgtaatcatcatatctgaataccatacagctcgacttaaccccgccataacagcgttttgatgtccaaaatttcttgataagcgaatgcctgtaaagaccttttcctggctttgtaactgctcaataatttcccaagttttatctttactaccatcatttacaaataagattttactatttgaactaattttattttgttcaattaaatcatcaattatgtttttgagcaatttagatgtttcatgcaatacttcctgctcatcatagcagggaacgactatagtcaatactttattagccatcttaaatcactccttattatttaacagataacttatataatgttccatttgagtttccaggtccgccactcattgcgtgagaactggttgagtttccaccgtatttacttaaactaacttttgtaccgtatttcttaacccatttaacaattgcattgttgttgccattatcattagttaagtagaaatacttcactttgcctgctttaactaattgcttaaacttcttcaaactaattgcattatctgtaccgttataaccaccaatggtcattactgctttgcccgtcttaataatatatggcgctgcagtatttgaatccattgttgcaaacaggtaggttgcattgccgttatgcttttcaagatatgaaatcatcttggtatttgcactgcctgagccaaatgagccgttaacgttatttgaacttaacaaactaggtccacttgtagggatagctgcactttctcctgaaagcgttggagttaatgaccaaaatcctggtgctaagagtaaagttactaaaattgcagataagctagctttcttattaaacttcttattagctgataaaacgatataagctgcaactgctaacccagcaatgattaacaagtaagttgcccatgaataatattcataaacataccaagcttgtaaacctgcagtagctaaaaccgcaactgccattaaataagtgttaacttttgaagcaaatttagcttctttttctacttcaactacatcatcattagcaagattttcttcttttgaatcatgctcagctaactcttccacctttttctttttagttttattttcaacaaatgatgcaattccgattgcagcaagagcagcaattggtggtgcaatcataatcatgtagtatggatggaagaattgggccatactgaagaatccataaactggaactaaccaaccaaaccagtataacaagtgtgtttggcgcttattaaatttgaaccattttctcttcttgcgccactcattgaagtaggcaattacaaatccgattagtgataatggcaagagccatgatacctgttgaccaagagctgtttggaagattctaaatggtccagccttaccaacgttaaaaatacctccgccggctccttgaccgccaccttttcctccggggccacccttacccattttgccaggtttttgaccacccattttaccacttggctttttcattgagtttgatggttgcttggtcttagttgagttagcaattttttgattctttcctggcgcttgattattacctccagggccaccttgtcctatttgaccacttggctttttcattgagccagatggcttagtgccacttggctttttcatattgccgtttttactttgactaggcttattaccgcctggcatattacctgcttttcccttatttttactgttcatccctggaaaagcgccacctgtaccagtactttgtcctaataatctttctgttccgttatagccaaaagctaaatttaaaactgagttattagtagaactgccaatatatggtcgactactcttacttgtagaatcaactgctagtggccaagccaaggtaaatactgctaagctggctgtagctgcaattgtccataaactctttttcttccaattttgtttgctagcaatgaaataaaagaagtacattgtaggtaaaaccataaatgcctgcagcattttaatattgaatgcaatcccaattaaagcaaatgaaactaaaacaagtaatggtttatgtttttgaatcgacttgtgtagtacatatcctgctaataataagaagaaaactaaagttgcatccatattatttgttctggaatttgcgaccacaattggggttaatgtcataaataaagcacccaagttagctgctaaacgaccaaagtatggtttaattaacttgtacattaagaagactgatccaataccgaagagaacagatgataagactatactccaagaatggaagccaaatatcttaacacaaatcaccataaaccaaagagctacaggaggcttatccaccgtaataaaactagctggatcaaaactaccataccaaaaagccttccaactttttgacattgatactattgccgctgtataaaattggttagcataacctgccttccaaatattccaaccatagaggaaggccgctaatattaaaatggcgaccagccaatagtcaattttctttattttttctcgcattttttgcttcattggtatgcctcctctattcttaaaccaaatatttatttagcttatgaaaaaagtttattctagtattatgaacaaattgtgattgatttgtaataaaaatagatatatttgtcgaattttaatctatatattttaaaatcatctataattaagaaagctaacaaggaggaaattgcatggctacaaacaccatttggaaaaagaatttatatattttatccattgcagtttttattgctggaattgctttttcagaaattatgcctttcttaccactatatgtagcaagtttaggtaatttttctcatcaggaactaaacttctggtctggttttatttactctggaatgtttattatatctgcaattacttcaccatggtggggaaaacttgctgataaaaaaggacgaaagttgatgattctaagagcttcttgcggaatggcaatcgccattggggctatgggacttgttacaaatgtttatcaactttttgcattacgctgtctgcaaggattatttgctggctttgtttcaaactccaatgctctaattgccacacaaactcccaaagaaaaagcgggccaagccatgggaacgatggcttcttcagttaccgcaggaactttattaggtcccttaattggaggttttttagcatccgtttttagttaccgtattaccttttttattactggtttcttactctttgttacctttttaatgtcactattttgggtaaaagaagataattttgttgtaaaaagcacaaacaacattggtaaaactaaagatgtaattaaacagtttaaatctcctaacttaatctttggactactcattactacaatgataattcaagccgctaataattcaattaatccaattgtttctctgtttgttaaacaacttcttcacggaaatggaaacgtggttttaatttctggaattattgccgctttgccaggtatcgccactttcactgttgcttctagattcggtgccttaggtgacaagattggaacccacaaaattattgttggtggctttatcggcgctagtatattatttttggcaactgcattcgtccaaaatacaattgaattaggagttttgcgattcttagttggcttttcagatgcttgtttattcccacaggttcaaactatgctaagtaaaaatagtccagcctctgttactggccgtgtattttcttggaatcagtcagcaatgtatattggtaatattgccggacctataattggaactactatttcaggtttatccaattataatatggtatttatcgtaactacttttcttgtactttttaattttcttttatttaagttaaatgtcatcaataatcttccagtaagccaagactaatttaagtctctatttttacgtttacactcagattagaatctgctatacttttaaaaagtttttaaaatatcaattaaaaggagaagcattttttgaagaacttatttgaacggttatctttaaaagaagatccatcagtatatgaagataaagattctcacttaaaaagaactttaggcgttaaagaatttctagctttaggtgttggaacaattgtttctgcatctatttttactctaccaggagttgttgccgctaaatatgctggcccagctgtaactatttctttcctattagcagctttagttgcaggattagttgcatttgcttatgctgaaatgtcagctgcaatgccttttgctggaagtgcttattcttggattaatgttatatttggagaattttggggctggattgctggttgggctttactagcagagtactttattgctgttgcatttgttgctagtggtttatcttctaacttgcaaggtttactttcaccaatgggattttctctccctactcaacttcaagcaggcttaggatctaatggaggtttatttgacttctttgcatgcagtgtaattttattaatcgctattcttctttcacgtggggtcaaagaagctgctcgtgtccaaaatattttagttgttttaaaagtattggcaattattatttttattgcagttggtattactgcacttcatcctaaaaactacactccatttgttcctgctcaaaaagcaaatagtgatggtaccatcttcggcggctggattggcatttatgaaggtgtatcaactatcttcctatcatatattggatttgattcaattgctgcaaactctgctgaagctaaaaatccccaaaagactatgcctcgtggaattatgggatcattattaattgctgttgttttatttgttggtgtaggattagtattagttggtatgttcccatactccgcttatgctaacaatgctgaaccagttggttgggctttacgccaagcaggacatcccattgttgccataattgttcaagcaattgcagtagtcggtatgtttacagctttaattgggatgatgttagctggttcacgacttgtttattcatttggccgagacggtatgcttcctaagtggttaggacatcttaataagaacaagttaccaaaccatgctcttgtatttttaactgtagtaagcgtaattttaggagcattactgccatttagcttcttagcccaaatggtttctgctggtacattaattgctttcatgttcgtaactttaggtatttacaaattacggaaacgtgaaggtaaagatataaaagagcctagctttaaaatgccattttatccagtactacctgcaatcgcgtttcttgcatcactaggcgttttcctaggtttagatacagctgctacgcttacagctactgcatggtttattattggattagtaatttactttagttatggaattaaacattctaccctagcaaacagtaaagataattaacaagcttatacaaaaaagatagagttttgaagttatttcgaaactctatcttttttgtaatctttatttttgttttctttcagctttagcgtagatagcatatgccaaacttccaaagaaaattggcccaattactgtccaaaatcctgttacccaatctccctgaaggaatggttcaacacaagtaaagataattccaaataagacaatcaaaaagctaatagccacaattaaattggtaaaacctttattcttaaatacctcaaatggtaagttcttatactttttcttaaataatggaaatgctgcaattagaaataaataagggaaactcgttgcaacattagacatatcagtcaaaattgtataaaaagttttagcttctccaccaccaaatgaaattaagaaaattaaaacacaaactaaaatagcttgcatccacattgcatgcgcaggaactcctactttatttaatttagtcattttttctgaccaaaggtgctttgaccccaaaataaatgacttaattggagaataaattaagataaagaatgatccaacatatgctaaaaacattcctaaaccaacaaatctaataaaaatactttgtaaaagtaaactagttgaattgcttaatcccaatgtttgtcctaagtaatatcccaaatgtcccatcatgacataagtaatattacctaaattaacactcttagaatttaagacatcattccaattaatactaattccccaaagtaaaacaataatagaatagcctgctgcaattaaaactgaagaaatcagcatcccgcgcgggaaagtcttttccggcttttcaacagagtcaataattcctcctaacgcttccattcccgcatacgcaaaaatagcataaacaataaatgataatgtagcaataggtgtttgaaagtcaggatttggtgatgaaattaatgctttagctgtcaaagcttgggaaatgtgtccatgtcccgcaatcaaagcaacaatactaccaataataaaaacaaatatcatccctgttacaaagtaaccacctattgatgatacctttgaaatcacttcagctccgtggctagctgcaaaagtaacaaaaatcatccataaaatagccaaaattccaattacttgggttgcattgaacggaccaaatgaccatgtttgagtcatgtcttttccaaagatcaaggcagaaaatggaataaagacttttgatgaaatagatataagccaaacaatccaacttgaaagccaaataaaagtaccgataaaggcccatttttcaccaatagattccttaagccaagtatacattccaccatgatcatctttaaatgctgcaccatattccgcaatcatcatagcaactggtaagaaaaataatacagctgcaaaaataaaccaaggaatactagcatatcccatttgtaaaaatgctactggcatattggcaaagccaaaaatacttgaaaaaatcatcataattaggctaaatagcccaattttcttctgtttatcactcataaaataacatatttccttctatatagtttcctttttcatcttttaaattttatcacgtttacttgtaaccgtatacttaaaaaagagagttggtaaattccaactctctcataatattattcattacttttttttaaccctttttcaactaattcaggatcagttttacctggatttaattcaactaacttgccacttgcaatatagataacccattcagcaagatttacaatgtggtctcctgcacgttcaagagtgcgaattacacttacatattgctcatatgaagggattgattcaccattagccatcatcttttctaaaagtcgcttttgttcacgaacgtaaataatatcaactttcaaatctttgttggctacttcataggcagctttttcatcagtgtaaacatatgcatctagaactttttctagcatttcgcggacaattgcactcatttcttcaattgcttgttcaatttcaggagagtggtgatttccctttagctgaaccgtggcacgaccaatatgaactgcataatcgcctaggcgttcaacatcattacttgccttcaaaatcgaaataatagttctaaaatcattagctaaaggctgttgcaatgcaattaatttaagagctcgtttttctaaactaatttcttcatcattgattgctaaatcaccattaattaccttttttgccaagactgggtcatgatctaaaaaggcctttgtagcttgataaagctgttcattagtatcaagtcccatttcaacaaaacgactttttaacttctttaattctgaatcaaacattacacccattgctcaaatatcctcctttaaccaaacttaccgcttaagtaatcacttgtttgctgcttttgtggattaataaagatttcacttgttttattaaattcaaccaattttccttgatgcataaatgctgtccagtcagatgaacgactagcttgttgcatgttatgagtaacgataataattgtatagtcttttcttaattcaagcatggtttgctcaatttgactagtagaaattggatctaatgcactagttggttcatccatcaaaataatttcaggctttgttgctaaagttctagcaatacataatctttgttgttgtccaccagataaagaacttccattactatgcaaagaatcctttacctcatcccataaagcagcctgttttaaactttcttccactctttgatctaaaatatcttttcgcttttctcctgcaagacgcaaaccataaactacattatcataaattgacattggaaaaggagtaggctgctgaaagaccattccaatttgtcggcgaagacgataaacattgattttgggatcgttaatattaatatcttcaaatataatttcaccagttacggtagctaaatcgtcattcattcggttaattgaacgcaataaagttgatttaccagaaccacttgccccaattaaagcagaaatttgattttgggggaatttcatagaaacattttttacaacttgcttgtcaccatatgcaacgcctacattttttaattctaacgcaatcttttccattgatttttcctttactacttacctaactttttactaatgtatgcactaaataatcttgcgcaaatattaaaaatcaaaatagttaaaattagaactgctactgccccactactaattgcctgagcatttggaactaatccttctgtatttaatttccagatatttacagccaaagtttctgctggtcgcattaaatttaagaaacttgttgggtcaaagggattccaattactataactaactgcaattgaactctgtccggaagtaaaaattaatgctgctgcctcaccaaaaattctccctgaagctaaaattactcctgttaaaatacttggaaaagcagctggaatcacaatatctttagtgactctccatttagtcatccctaatcctaaacccgcttgtctttgtaagtagggaatttgtcttaaagcttgttctgcatttgtagtcaaaagtggaatattcaatattgttagtgctaaagcaccagctaaaattgaaaagcccattttaaaattaactacaaaaatcaaatatccaaaaagtccaattaccacacttggcaaggatgataaaacttcaatagctaaccgcaatgctcttgtgaaaacattatctttagcatattcacttaaataaatagcagccccaagtgaaagagggattgaaataattaaagtaataactactaaataaaatgaattaaataattgatctctaattccgccattggtactaaaagaatcacttgcagttgttaaaaaatgccaagatagttgaggtaatccttctactatcaaataaagcaagaataagataacaagtattcccgcaaaaattgcaccactactaattaaaatagtggctaaatggtcgcgtttttctgcattcattgcttatcctctctttttattaatcaatttaattaaaatattgaatactaatgacataactaataaaacgaatgctaaactccacaaggcatcattagcactggttcccataatcgtattacccattccagttgttaaaacactagttaaagtagctgctggactcattaagttttgtggcattaaagcagcgttaccaattaccatttgaacagctaatgcttctccaaaagctctagtcattccgaaaactattgctgttaaaagaccaccttttgctgatgggattacaaccatatgtaacgtttgccatctagttgcccctaaaccataacttgcagttcggaaagttttaggagtagcacgtaaactgtcaaccatcattgaaaccatcgttggtaaaatcatcataaacaaaactactacggcagctaaaattccaaatcctgatccaccaaaaatacttcttaaaacaggagtaactaaaattaatccagcaaaaccatagacaactgatggtactccaactagtaattcaattattggttgtaaaattttaccaaaccattttggaaaaatttcgttaattgctaaagcgataattaaagcaaaaggagctgcaattaaaccagcaagtaatgttactacaaacgaagttacaatcattggtaaagcaccaaaactattgtgactgggttcccaattactacttgttaaaaattgccaaacattagcatgatctttaaaaaataaagctaatccctttccagttaagaaaaagataatactaataactactagcccaattaaggcaatagaaccatatgatattgtctttccccatttttcttcataactttcttttgatggagataataaaagatgctttttattttgcttcatcacgttacttctttctaactacgccattaatatcgcgaactactttcatatcataaatacttatgtaatgtgctcgcttaaccaacgtattttgcacttcttttgactgaatatattcaataaatttaactgctgctgcacttgcattcttttgtgtatacatatgctcataagaccataatttatatttattagtttcaacatttttactacttgcatcaatgccatcaatagttaaggtctttatagaattatcaatatatgaagttgagacatacgaaattgcaccaggagttgctttaacaatctgcttaactgatccatttgagtcttgctcttgagcctttaaaggttctttaccttttaaaatcaattcttgaaatgctgctctagtacctgagccacttgctcgattaataatcgtaatttctaaatcaggtccccctacttgcttccagttagtaattgtccctagaaaaatatcacgtaattgattagtggttaagttcttaatattcaatttcttgtttacaattggaactatggccgaaatagctacaatgtggtctgttaatttcttagcattaataccttttttactttcagcatatacatcagaagatccgatttcgacagttccgttttgaacttgcgataagcccgtacctgaaccgccaccttgaacaattaaattaattacaggattctttttcaaaaagcctgccgcagcactttcactaagtggctgcaaagcagtagagcctacattggttactttactcgtttgtttaactccatgtgattcataatcccaccagcaaaaggctattagggcaatgaacacgaggccaaagattgattttttattcatcttctccacctgttttcttgttatttttctaactcttgtggtacaaataataacaaaggaatgtaaatgtaaagtttttcttatgtaaaggctttgtaaatttttgaggaaaaaatgacaaatagattcttaattttatctcaaaacccggatttaactactaaaatagaacaactaataaaaaagaaaagagagaattatcgacacttaactacaccgacatcattagttgttgcattaaatgacgaaaactattctggaatcttttgggatattaccaaatccaacttagacacaacacttgcaacattattattaattcgtaatcaggtcgctggccccattattatttttacaaacagccattctgatcgaacgctagataagctttataaggcaaaagtcgactttgtagccggtttagaaattaacgagaaattgttattaagaatttttgagcagcgattatggagctattcttacaaaattcacactcaagaaaagaaattaactaatagagcagatgaagaaataattgaaactggaagcataaaaattaacattggaaaatattcggtttttaaagataacgaacctgttgtattaaccccaaaagaatttcaattacttgcttatttagcccaaaataaaggtaatgttatcagccgtgaacaattactgcagaagatttggggctatgatttactaggttcttcaagaattgtagatattcatatatctcatttacgagataaattagaaaacgattcaactcatccagagcatattttaaccaaaagaggttttggatattgttttatataagtcgaactttttaatagcttgtttttaattttgtaagtctttaagttgacaaaaagcttttttctttgtatcctagtcaagatgaatttttacatccaggccactcgggcctgcaggtgctatttttagtccttgggcccaggccttaggacttttattttctaaaatagaaaggtttgcaaaatggcacaagatgttgttctcgatgtagaagaaaagcctagttttggtcaatggattggactaagcatgcagcacatgttttccatgtttggctcaactgtattagttcctatcctagtaggattagatccaagtattgccctattttcatctggtgtaggtaccttgcttcacctcttgattacgcaccataaaatccccgcatatatgggatctagttttgccttcattacaccaatgattgcattaatgaagacagctggttatcctgcaattgcacaaggggttattgccagtgggttagtatatttgattgttgctttaattgtcgcttttgccggaagtgactggattgatcgaattttacctccgattgttgtcggaccaattgtaatggttatcggcttgtcacttgctggaacagctgcaactgatgcaacaatgaataatagcaagtatgacttacgctattttgcagttgcaatgttgactttgctagttactatcatcttcaatatgtacttcaagggtttttggggattaattccaattttacttggaattgttagtggctatatcattgcttgcctatttggaattgtcgatttttcaaaagtaatgagtgcaagttggatttccatgccaaaatttgaaattccttttgtttcatattcacctaagatgtattggggagccattttgagtatggcaccgattgcctttgtaacaatgactgagcatatgggtcacatcatggtattaaacgagttaactggccgagacttttttaaagatcctggtcttaaaaagacattagccggcgatggcgccgctagcatcgcagctggtttattaggtggtccaagtgtaacaagttatggtgaaaatatcggagtaatggccattacccgcgtgcatagtgtctatgttttaatgggagctgccgtttttgcaattctctttagttttgttggtaagttaagtgctttaattgaatcaattcctagtccagttattggtggaattagctttttattattcggagtaatcgctgctagcggactaaaagtgattgttgaaagaaagattgacttcaataaaaaacgtaatttaatgattgcatcagttattttagttattggaattggtaatgcctaccttcaattaggtgattttcaattttctggtgtagctgtagcaactatcttggggattattttgaatttagtcttgcctcaagaagcagcaagtgaaaaagaataaagttcatttagattttcatagttaattatttttcagatgccaatatcaaattatcaaggtctgcttaacccaagcaggcctttttatgatagagttattactgttgaattatttttctggaggaaaaactatgaagcattcacgagttccacgtattagccttggaacacaaattatcattggattggttctaggaatcattgttggagccgctacttatcataatcaggtagcaatctccactatgtctggtttaggaactatctttttacgcttaattcagatgattgttatgccaattgtggtttcatgtttaacagtcggaattgctaatattggcgacttacgtaagttgggacgaattggtggtaaaacgctactatactttgaagttttaactactattgcaattattttaggtttagtagttgctaacataacgcgtcctggtgattttattaacatccattccctgcaaggtggcgatatttctaaatatcttgctactgccaaaacagcctctaaaactggtatctgggatacaatttttgcagttattccaactaatatttttaaatctatgtctgaaggcgacatgatgcctgtcatctttttcagtgttttctttggattaggtattgcagcaattggtgaaaaaggaaaaattatcacccaatttttgaatgccgttagtgtcgttatgtttagagtaaccaactgggttatgaagtttgccccacttggagtattcggtttaattggaatgaccattgctcaaatgggcttgtctgcactactgccattaggttactttattttagttgcctatctaactatgattttcttctgtattgttattttgggaatagtggcttatctctttaaacttgactactggaaaacaatgaagaagatttggccagagattttgcttgccttctctaccgctagttcagaagcaactttaccgcgcttaatgaagaaaatgcaagatatgggtgtagaaaaaggtgttgccagctttgttattccaacaggttatacttttaacctagatggtagcgcaatctatcaaagcttagcagcgattttcctagctcaagcatatggacttcacttaacttgggaacatcaatttactttattagttgtgttaatgattacttctaaaggaatggctggtgttccaggtgcatcatttgttgttttattagccagtgtagcgacaatcggagttccaattgctggattgacctttattgctggaattgaccgcttcgttgatatgggaagaaccagtgtaaatgtagttggtaatacctttgccagcttggttattggtgaaagtgaaaaagcacttaatcgagaaaaatacgaaaaatatctaaatcaataaaaaaagcctcgaatccacaaatggacttcgaggcttttgtatgaaaattaattttcttcaaaatagcgatcaagttcttctaagtaaaattgcttttgctcttcactaatccagctcatcttaaatgagttagcagctaaagcctttacttcgtcagcactcaaattatacttttcaacctcagcttcataattatctgtaatgtatccaccgaaatatgctgggtcatcactgtttaagcagacacgcacgccctgttcaagcaggtacttaacttcatttcctttcaagtcaggacttaaaaagccattagaaagtggacaactagtaaagccaactttttgcttagcagcaaaagcaactaaattttcattttcgacaatattagttccatgatcgattcgttcagcattaattacttcaagcaagtctttaatatgcacaattgaatctacttgatcaacatcagcgtgagcagttatatgaaagcctgcttcacctgccttagcaaattgataataaaatttcattggtggattattgtgttcatcagagtcaagtccaatccctaatatcttatcttgatgttgcagggctttttcgagagttttttgggcgttatttcttgaataatcacgtaaaaagcacattaccaaatgtgcatcaacatttaacgccctggcatcaactgttgcttggtaaagcccatttaaaacagtttcaaatctaataccacgactttcgtgagcttgcggatcaaagaacatctcaacatgacgaacattatttttagcggcttttttaagataagccattgccaaatcataaaagtcttgcttagtctgtaagacttgcatggcttcataatatactgctaagaaatcggctaaattgtcatattgcaaagttgcctttacttcttcaattgttttctgagccaattcaacatgatttctctcagccaattctagtttcaactttggctccaatgttccttcaatatgaacatgtaactcagctttaggcattttctctaaaaaatctcttgttaaatcgaccattatatcctccagttgtaaaaataattcggaaagttttgattaattgaaaaagatattagcactatctaattttttattcaagttaaaagcgaattatttttctgcttgatttttatattgtttgtgttatcgtataaacaatatattttttaatccaaacagctataggaggaaaaacatgtcaaattggaataacaaatttgttaaagaaggccttacttttgatgatgttttattaattccagctgaaagtcatgtattacctaacgatgttgacttaaaggttcaattaaccagcagtttaaaacttaatcttccatttattagtgctggaatggatactattactgaacatgaaatggcaattgcaatggctcaagctggtggtttaggcgtaatccacaagaatatgacaattgctaatcaagccaatgaagtaaagcttgtaaagaatactgaagtaacttcagaaaaagctgccgtagacaatgaccaccgcttattagttgctgcagctgttggcgtaactactgatacatttgaacgtgccagcgccttaattgatgctggtgcaaatgcaattgtgattgatacagcccatggtcattctgccggcgttttacgtaaaatcagtgaaatccgtgctaaattccctaacattaacttgattgcgggaaatgttgccactgctgctggtacacgcgctctttatgatgctggagtagatgtagtaaaagtaggtattggccctggttcaatctgtactactcgtgtagtagctggggttggtgtacctcaaatcactgcaatttatgatgctgctaatgtagcacgcgaatatggaaaaacaattattgccgatggtggtattaaatactcaggtgatattgttaaggcattagcggctggtggcaatgctgtaatgctaggttcaatgttttccggtacacatgaaacaccaggtcaaatctttgaaaaacaaggtcaaaagtttaaggcatatcgtggtatgggctccgtaggagcaatgagccaagcccatggatcaagcgatcgctacttccaaggtggcgtaaatgaagcaaacaagttagttccagaaggagttgaagcttgtgttacatataaaggatatgttaaagaggttattttccaattaattggcggattacgtgccggaatgggttatgtaggggcacctgatttagctgctttaattgaaaatgctcaatttgtacgcattactaatgctggattagttgaatcacatccacatgacgttcaaattacaaaacaagcccctaattatcaaggataataaaaaaagaggtcgctatagaactttttatctatagcggctttttatgggaaaaggagcttttatgaatcacgaatcatttcaagtaaaagaatcagagcgaactactaatagttgggatatgtttgcgacctggattggagcaaatgccaacaacggaacttggtttgttggtggagttttggcagcctgtggttttgcactagctactaaaattcttgttttatcttctgcactttcgtatatctttttaagtttagtgggttatatcggatacaaaactggcttatcaactatgacaatagcaagagctagttttggtgaacgtggtagttatcttccttcattagtaaatattacacaatttatcggttggacagcagttaacacctttattgccgcacaatctgtcagcttactattaaaagatcttttgaatatacataatgaaaccatcggtttaacaatcggaattatcgttatgagtattttgcatattttaagtgtggcaagtggatcaaaatcaattcaactaattgagcgtatcggagttgccttagtatttatctttgtaatttgggaatcaattgcagtattcaaggcggtatcgctcaatcaaattatctcttggaaagtccctaattcaagcaaaatggccttaggaaacgcaattgattatgtagcagcctttaatttagcttgggttacagctggagctgatttcactcgctttactaagaaaaagcataattcaactattgcaccatttttaggagcattaactggggtgatttggtttgcaataattggtttaatttcaactattagcattgcaattacttctggtgtatacaatgccaataattcagatccttcaacaatcgcaagtaagttaggactaggaattgttgcattattagtcataatcttaacttcaatgacagctaacgccgttaatttattagctgctggctctgctctttcaaatatctttcctaaaataaaactaaagcactcactttggatagtagtaattgcagccacaattgtgacttttattccaatgtttgtcggctctttcttagaaacttttgaaagcttcctagattacgttggaatggtcctaggcccaatcgtcgctatcatttgtactgattattatttcgttaaaaagaaaaattatgatattacccaatttggagaaaagcttggaaaatattggtataaatctggtattaattggaaggcagttattgtttttatagctggtatcatagtttttgttctaggcaaaaatttcatcgtattatcaaataccgttggtataacttttatcgacatgctaatttgtagtttattatacttgagtttaatgaaaaattaaattaactaaaaaaggcacattttctattgaaaatgtgcctttttgctaagtattttaagatacttaattcaaatcttttattttcttctctgctcttgaatagaaaatccaagcaacaataccaaagaaaacaggtccaaatgcagtccaaaaggccgttgcaggatcaccttctacaattggttcaatgattgtaaagataattcctgccgcaataacaatccaaacaattgtagttacaatccaaacccacttttgacttcgataaaagacaaatggtcgatctaaatctttcttcatcttaaagaatggaaatgctccaattaagaataggtatggtgctgcagatgaaacattcatcatgtctgtgagaactgtatagaaagcacttgcggaattgccaccaaatgaaacaaacaagatgataagtgagacaaatgctacttcacaccacatagcaaattctggcatatcatacttgtttaaagtagttagtctctttggaagaagacgctgatcacaaccttcaataaatgacttaataggtgaatacagcataacaaacgctgcccctaatccacctaatacatcacttatcgcagtgatttgcgaaaatactttacctagtactaatgcttgtgcatgacccaaaccaaaggctttaccaaaaacaagccccatgttattgattaatacatattcaacgttagccaagtttacgttcttttgacctaaaatttctgaccaattcgctgtaacgccacataaaaaaatagtcagaatataaagaactgtcatcataatcatggcccaaattaagcctcgagggaatgttttttcaggtttatcaacattatcaattactccagccatagtttccaaaccaccataagcaaacaatgcatacacaatgaatgaaactactgcaaatgggctagtaaacgatgagttaggtgacttaactaaactagctgcagtcaatggttcagctaattgaccatgttgcatcagtaagattatcaagctaacaacaataaaaactactgaaattcctaaagtcgctactccacaaacactagaaatcttaacgattccattaattccttttgaagcaattgcacaaacaattaccaaaaagattatttctaaaatacccaaagtttggtcacttgataatccaaataaatgccaactagttgtagtatctctaccaaaaatagctgttgctactgatactaggaaaaattgagttgatgatacaagccaaattacccaagcagctaaccaaataaaggtcccaacaaaagctggcttttcaccaattgagccacgtagccaagaaaaaatcccacccttagctgctttaaatgaagcaccatattctgcaaacatcaaagcagatggcaggaagaatagtacagctgtcaatacataccaaataatacttgagtagcccatctgataaaatgctgttaatgagttactataaccataaattgaagagaaaatcatcaagattaacccaattaaggttatctttttcttcttttcactcataaaatccctcggttcaaattatttctaaaaatttatatatgatactatacattttagcactcggtaaagtattaaaaaagatataatttgaagctccgaaacttattagtagcttttgtttattttttaaaaaaagctttttcaaaacgattgcaaattagtttaaccaatataccatcaaaaaataaactacttacccaaccggtaaaaaacatcaaaatttgtaaattcaggttatatttgtaccagccatataaggtatatgttaagaaaaagccagtaaaatgagcaccagtagctcctaacaaaacagctacccaagagaaattctttctacttttagctgttaaaaagcctatttcatttccaaaaccttggacaaaaccagctaaaattgtaattactccccattgtcctcctacaagcatctcaccaagagcagctaaagtttcgcctaacgtagcgctcccttttgctgggacaaagtaaataactaatggtgcagccatgtaccataacccactcatcaaagtatcagttaattgtgcataaccagtaggaagtaatactgctttggccagattgtaaattaaattaaatccataagtataaattactcccattattagcccgattaaacttaccagaataattgcttgaatatcccaatttgacttctttttaaacataaaaatcctccttttaacttagtcaaaaggagggttaattttgatttaatccactttcctcgcgctggcattacccagttcaggttcaaagggtcgacctaagtctctcagctactagctcccctagtgacataaattaatactaatatttaactatagccttagtatagcatattatttaagataacttatcttttatgctatcataataatattggtttcaataaaaaacaaattctagaaaggatgttgcatccacacatgggtgaaccaaataaacaagataaaaaggaaattcgacgaaaacaaaagaaaaatattttttataagcgtaagaattataaaaaagctcctttttctgatgtccatgcacaactatattgggcattagtcttaggccaaatcgcttgtgcttatgctttaggtattgcaggtagtgcctttaaccatgctaagctcgctttgaatattaatgatacttggttaggtttattaggtgctggatcattgattggtttagcaggaagctttatcatgggacgaatttctgaccgctttggccggaaacatcttttgatggctaatatgtatatctacacaatcttatctattttgcaattctttactagcaacttactcttactattcattctcagagtcggaatcggattaatgattgccatcgattatacagttggtaattcaatcttagttgaatggctacctactaaagatggtgcaaaaagacaaagtaacttgctactatattgggcatatggatttggactttcatttttagccagtcaatttattagtaattggcgacttatgctctgttcttctgcagttttaggattgattgctgcaatctaccgaagcgttgtacaaattccccactctccttcatggcttgctagtcatggtgaacatcgccaagctcagaaagttatccaaaagaatcttggtaaaaaatggggcttacctaagaacttactacgtattagaaagaaatctgatgcttcaacagctgaattatttggaaagaagtattggaagtcaactttaactgggactgccttttatgcaactcaggcttttgcatttttcggaattagtattttcttgccaattctattgaagaatatgcatatgaataatgctttcttgtctggcttactttacaattcagcaattattgtcggaacagcaattgggatttggttgtttaataaaatgagcagacgaagctttttaatcttaacttttacaattccaatcatttgtctcttcattttagctttattaccaaaattaccatcagtattaactttattggtatttactgttttctcaattgtactttcagcttcattattacttgactttacatatactacagaactatttgaccttcgcattagagcaacaggtgttggttttgttattatgatgagtcgtgttggggcagctgctggtacattcttgttaccaatcattgttaatcttgctggcgcttacgttactttatgtgtctgcggagttattttactaattgggacaattatctgtcttttcaccgctcctgaaactaatcctaagttcgttaagcaaggaaataaaaacaattaaaccaatcacataataacgaaaaatagtcaccgatagatggctatttttttattagaccaatcatggtattatttttattgtgcgaatttaatttgaaaggataatccttaatgactcaaactaagaattacaaagatgcacctttctctaaggtgcattcacaaatttattgggcaatgaacattggacagattgcctgtgcttacgctcttaatgtggccggaattgcttttggaaacgggcaacatcagctaggcatcaataactttctcttaggtttacttggagctgcaagtttaatcggattaatcggcagcttcttcatggggcaattagctgatagatttggtagaaaacatatactaatgagtaatatgtatatttttaccattttatctttattgcaatactttacaactaacgtatggcttttattagttcttagattgttaattggattaatgattgcagttgattacacagtcggaaatgccttaatggttgaatggctacctactaaagatgcagctgcaaagcagagtcacttattattttactggacattggggcttttaattgcttatgtgacaggacattatgttagtgactggcgcttactcctagcttcaagtgcagtctttggtttaattgctgcacttaaccgtagcttcattcgcctcccagcatccccttcatggctagcaagtcataatcaaaatgaatcagcaactgaattaattcaggaaagattaggaaaagaatggggtttacccaagcatttagttgagcttgaagaagatccaagtattaactggatgactcttttttccaaagattactggcgtcaaactttagctggaactgccttttatgctactcaatcttttgcattcttcggaattaatattttcttaccaattctattaaagagtatggatgtaacagatacatacctagctggtttattttacaatattgctactgttgcgggacctgcaattggtatttatttctttaatatatatcgtagaagaagctttttaattgttactttttcaatttccagcctttgcttattcattttagcttttggaaaatcaattaattcaattatcgaaataacaatctttacacttttagcagttattttaacggcatctgtattgttagatttcccttatacatctgaattatttgatattaaacttcgtggtactggtgttggttttgtcatcgctatgagtagaattggcgcagcattaggaacattcttacttcctgttgttgttagtgcatatggttcatatgtaacaatggctatttgtggcgtggtcttgctactaggtacagtaatttgttattttgttgctcctgaaactaatccaagatatgttaataaagattaaaaaaactcaccaatggtgagtttttttatttatcctattctcctgctaaagcatcaattggatttaaacttgctgcatgacgtgcaggtaaaattgcagctaataaagaaataataattgaaattacaaaggcagaaatgatattgccagcactaatttgaataaatgaataatgtgcaattttagataaggcagaatttgctaaagtttgaacgattaaagcaataattgttgcaaatgtcgcactaaatattcctaataaaatagattcactagtaaaaagacggcgaatatctcctttactttcacctaatgcccgcaagattccaatctctttagttcgatcagaaactgacatatacattgtcacaataatcattaaagcagatactaataatgaaattcccgcaatccctgctaaaacattagtaatcaaactaatatatgtttcaattctatcaagaattgatgatactgcagtagcagtaaatctcaatttcctattaactttagcctcattaattcttttagctacgcttttagcagcattcatactctttgcactgacacctaatgcggcaacattagttgacatattaacagctttcaaagcatctacaatagtactacctccaacggcattaatctgacttgtaccgctactttcagttaagccgactacttttactttaactgtcgctacagccttttgacctaatttatttaatcccgtatatgtcaaagtaattttctttccaattaaagaattcggctgatttgtcagactcttagcaacatcttttttatcgataactatttctccggttttaggcatccttccctttttaatgcttgaagtatttaaaatactagtccaattagtcacagtagagatattagtatcttttttgttaaaactaatcgcaacatttgaaagagtataaattttttcaacttttgttacatcttttactctctttaaagtattgatatctttctttgaaaaagcactaatttttttatctcttgtagctaaattaacatatgtatcttgctgcttattattagatttgacatatggagtaaccaacacttgcttcggattaactaaactattaacctgctgatttacgtagcctttaacacctgtacctagtccattaaaagtaataacgctaaaaagtcctacggctgtaccaataattattaataagtttctcttaaagtgatatttaaaatgtttaaaggcatttcttacactagttaacaaaggtaactttttcgaatgtaactttctctgaactttagctttatatgctggttttaaacgctcatctgaaataatttttccatcagccaagcgaactattctggttccagagtcagctacatgttgcgagtgagtgactgcaataactaatctaccctcagcagctatttgattcaaaagtgttaatacttcttcagtattttgagagtcaagtgcacctgttggctcatccgcaataattacttgtggatcatttgctaatgctctagcaattgcaacacgctgtttttgtcccccggataattgtttaggatattttttaacatggtcctctagtccaacttgctttagtaaatcaaaagcccgttgttttctttcattgacacttagagttgtcatatctagagctaatgaaacattgtccaaaacatttaaatgcggaattaagttataactctggtaaatataaccaactgtttctcgacgatatttatttaaactggtttctttactatgatttaacctttgcccagctaatacaacctcacctttaaaagcccaatctagtccaccgataatattcattaatgtggacttaccaccaccagattcaccaagaattgagacaaaatctcccaattcaaaatctaaatttattcccttgagaactggaaattcttcttttccgaggaaataagatttataaatattctttagctccaaaaatgccattataacctccccgataagttaaactcgaatgcttaatttttaccaatattaatatagatatagctttcctgtcaataaagttaaataatttgtcgttatatttaacttttatgatattatttgatgtaagaaaggtcgtgttcaaaatacgccgagaaagaaaaaaagaactaaatcgtcaaaaaattattgcagcagctaaaaaattatttttaagaaaaggtatcagtgctacaaacgtacgtgatattagtactgtatcaggaatttcttatgtaacaatgtataaatacttttacgataaaaatgatcttattcaaatcgtttgtagggaagttattgatgaagtcatcaactatgcatattcacaactaaataatgaaaatctaacttttttcgaaaaattacatcgtttaagttttaaggaaacctttgagaaaatctacggaactaccgctttcatagacttttctaattatataaattctgacaaaaaattagcagtatatataaaccaaagaataaacaatagttggataaaaatagttgaagctggtcggcaagatggctttatacacgcatctgcttcagatgagcaaatttgcaaatttttatctttaatttttaagcttgaccacaacgaagttaagaaaaacatcaatgaatatggtgaattatttctatatggtttggcaggtcataataaaaacaagtaaatgcattgacttactttttgtaagatggtaaattattaatcaataagcactaacaaaaagttagtaattttatgaggaggatttgccatgagttggtttaaaaaaataagtttatttgctgggttgattgctattagtgtggggctagtagcatgcagcaaccaaaaatcatcaagtagcgaagtcttacataagggtactttaactgttggacttgaaggaacatatgcgccatatgcttaccgcgaaaatggaaagttaactgggtttgaagtagatttagcaaaagcggtagctaagaaagctggctataaaattaaatttgttcctactaagtgggattcacttattgcagggttaggtgccaagaagtttgatattgttatcaacgatattgcaatgacgcctgaacgtaaaaaagcatacgctttttcaactccatacatttattcaaaatcagctttaatcatgaagaagactaataatactattaagagtgctaaagatattaaaggtttgaaaattgctgcggctacaggtacagccaatgccgataatgtaaagaaatttggaggacaaaatgtatcttctactgatttctcaacagctatggaattaattcgccaaaatcgtgtagttgcagcgatgaattctaaagaagcattcctgtactatcaaaagagtcaacacgtaactgatttaaaatatatggaagtgccatcaagtcaaatcgctgcacaagagattggcattatgatggctaaaggaaatagttcattacaaaagaaaattaataaagcacttaatactttgaaagaagatggcactttatctcaactttctaagaaatactttgatggtgacatcactaaaaaataataactagcaaaaaactctggaatactttagtatttcagagtttttttgttaagtaatctatttgacttactttttgtaagatgataaattattaaaagagcttctaacaaaaagttagtaattttaagggagacaatttatgaaaaaaattaagaatatttttatgactgtacttctaatgttattatctgttggcgtagtagcatgcagtaatcagaaaaatgctaaaagtgatacattaactaaaaatactctaatagttggacttaatccttctggatatgggccattttcccacctggaaaatggtaagttaactggctttgaagttgaaatggctaaagccttaacaaaaaagatgggttataaaattaaattcgtgcctactaaatgggattctctaattgctggattaggtgctaaaaaatttgacgtagtaattaacgatattgcagtaactccagaaagaaaaaaggcttacgctttttcaactccttatttatattctagatcagtattaattatgcgtagcgacaacagtaaaattaaaaaaataactgatattagaggagaaaaagtagctgctgcaacaggaactgccaacgctgatttagttagaaaatttggtggagaaaatatttcttctcccgatttctctactgctatggagttggttcgccaaaaaagagtaactagcgctatgaattcaaaagaatcgttcctatattttaaaaagacacaaaaagtatcagacttaaaatatctacaagcatctgatacagatatcccaactcaacctgtcgctatcatgcttaacaaagataattcaaacttacaaaccaagattaataatgcacttaaatctttaagaaaagatggtactcttactaaattatctaagaaatattttgctgctgatataacaaaaaaatagaaaggattaattatgtgggaaattattaaaacaagtgtcccagaaatattaattgctggattaaaatatacaattccaattgcaatcatttcttttatattaggaattataattgcatctattactgccctaattagaatgtctacaccaaaaggtaatcctctaaagaaaggcttttggcattttttaaaagctttttttaccttttatgtttggctcttccgctctactcctttattggttcaactatttatagtcttttatggcttacctagtattggtattcaactaggtgcttggactgctggtatattgaccttttctttaaatactggtgcgtatgcttctgaaacaatccgagcatctatcttggcagttcctcaagatcagtgggaagcagcttattcaattggcttaccttatcacaaagttctaagtagagtaatcttccctcaagccataagaattgccatcccacctttatccaattcatttatcggcttagtaaaagacacatctttagctagctcgattaccttagtagaaatgtttatggtcagccaagaaatcgcctctcataactatcaaccaatgcttatgtactcaattgtagctataatctacgcaatcttttgttctctactttccttactacagttatatcttgaaaaaagatttgaggtgaaataatgcttaaactcacacacttaaataagagttatgaaaatcataaagttctagatgatattaatgtggtttttccaaaaaataagactactgttattttaggcccaagtggtgctggtaaatctaccttacttcgttcaataaacttattagaccaacctgaaagtggctcaatagaattagataatctaaaacttaactacgaaagtaatttatcaaattctgaaattttacaattacgacgaaaaagtgccatggttttccaaagttggagtctatttccacacatgaccattatggaaaatataattgaaggacctactcaagcaaaaaatgagaataaggaacaagccattgaagaaggcaaaaagctactagctgaagttggcttggctggttttgaaaatcgctatccatctgagttatctggcggacaacaacaacgtgtatcaattgctcgagctcttgctttaaagcctagctatattttatttgatgagccaacaagcgcactagatccagaacttgaagcccaaattttacacctaatccaaaaattagctatggaagataaatctatgattgtagtaacacataacatggattttgctcgtaaagtagctgataaagttatctttttagaaaacggacaagtcatttttgacggagagtctaaagaattttttgaaaataagaatcggagaatacaagactttttaaacgcaatgaaattttaatattgaaaaaggcaagccttagaatgatatgaaccccgaaattcggacatgaatttcggggttttattatgactaaattatctaaacaagacaaaattgatatctacaataaatggaaatattatggtatttcatgtaatcaactagctaaagaatacaatattaaaaataattcaaacataagttatctagttcgacttatagataaatatagcttaagagtacttgaggttccttatactaagtattcagttgaatttaaggaagctgctattaagcgagcgttatcaggtaaagaacttgtagatttaatctctttagatcttgctcttcccaatagtggaatgcttcataattggattcgcaaatataaagaagatgggtataatgtgattaatcataagaaaggtaaaccatcttctaatggacaagaaagatcaaacaattcgcaagcttcaagaacaacttcgcaagcaaaaaaaagagaacttgaaacttactatacaaatagaatatataaaaaaattagatgccttagtggccgaaaagctcaaaaaccagaagcccaagaattagcttcagcggttactgaactaaggcgagaattacatgtaaccgtagattttatccttgaaactatcaattctaatcctgacctccctcatctatctcgtagtaattattactacaccatcaacaaaatagataaagatgagaagaatagagacattatgcagagaattaaagatatttttgaagaacacaaacatcgttacggttatagaagaattacagcacaattaagacgagaaggcttaaaaatcaatcataagaaagtaaaaacgcttaatgactaaaatgcatttattcggtcttactcttaaacgtagagctaagtattccagctatagaggaactaaaggaccaattaagcctaatttaattaatcgaaatttttattctattcttccagatagaaagtggtattcagatataactgaatttcacttggatggagaaaaactatatctttctccaattattgatggttgtactcaagaaataatttcatatactatcagtcgtcatccggtgttgaaacaagtaatggatatgttagaagattcttatcaaaagcatccagcacttaatggattaatttttcatactgatcaaggctggcaatatcagcacaaaacatttcaatcatggcttgagaaccatggtgttattcaaagtatgtcacgtaaagggaattctttagatgatggattaatggaaggtttctttggtattcttaaaagagaaatgttctatggttttgagaaaaatttcaagaatctagatgaactagaacaggctattagagattatattgaatattacaatcacaaaagaataaaaacggtactaaaaaaccatactccgaaagaatatcgaagtatggtcttaaagaaagctatttaatatgtcctaattttagggttcatatcagaaaggcttgcctttttacttaggataattaactatgcgtaaacgtcctcgaatatattcagctaaataaacgtccattgcattattaattcccttttgatgaagttgttcgtttagccaatcctcgtctttatgaatcaaatctaaaacatcatgatttatttggccatcgttaattacaggaaactttacattgctttcattattttcaattaccacgaattgtccattagcatcaacaaatgcactcttcacctgactagtatcatttattccattagcacgtaaacgcatcataatttcattagcagttattccatttttaacgcatgttttaacttgaatttgaccattcttaataatattaaatggctggccatctattaaaattctagcccaacgtaaacgagattttaaaacataaatgatgaaaacaatcaaagtccaaatcaataaaataatcaaaaattgtatgatagttattgattcattatagattatcccacctataattcccccaagtacaaaattttgaatttggtcaatcggagatgaaggagctaaatttttcttaccaaataaattaatttgtaaaattaagcataaaattccaattacaaactttacaccaactgcagtataatccatcgtttcctcctatttatgatattttacttgttcggaaattaaatgcgttctattcaaagtataatttgaagcatctgaagataaggtcacgcgataaaactttcctttaatcttaacaataattccatcagcaaattgagaagaattaacatatacatccttagttttaacatttttttctcgagcaacggattttataaatggtgccatttgtgaagtcttatttccttgttgtttagattgattataattttctacttgacgaaaaacttgaatagaaataaataagccaaaaataagcgcaatatcgcgatattttatatcataattgtgtctaaaataaaaaataactgcccagataagtaggataactgaaataatgattgagcccataatcaagctagaattaaaactttcttggttttgaatataatcaagtgaataaaaatccattttcttttctcctttacatagcattattataacaaataaaaaaatcgctcaaatgagcgactatagatccttttttaatactttaacagtttgagcggcatattgtcccaaaggaaaggcattatcgccaacagcttcaaaaccattttcttcaaaaaatttcagggcgactttattctcttcccaaacttctagccatactttttgtttttttaattcttgggctagatttaaaacaacatccattgctttctggcctaagccctgcttttgatatttgggtaataaatataatctttgaagttcaaagtcaccaatatagtttttattagttactgattcatcccaatttaccttgaaatagcctgccttttcgccatcaacttcgataaaataaaatcttgaactgtcagatgaaagttcatctctcaaaattgcaggattatatgccaaatcaagataagcatctatctcccctttatcatagtacggggaaaaagtagcctcaaaggcttcacatgacaaatttaccaaataatgtaacgctcgttcactttttttaactgggataatttttaaactcatttaaataccttcaatactaccgtcattaatcaaattcatcaatatataatataaaattacgcaaaaaatctcaacgtgagtgtaattaattcaaaatatcttaacttaaatcacgatgattttcttcaaaaattgcccctggtaacattcccaaatgaataataatatctgccattttctcaggcttttctttttttccattcatcagccaatattgagttactccaaataaaccattagcaaaaatcaaagcagcataatttagtttagtcttgtctctaatttttaaagccaataacttctgggcttcttgatacattccttctttaaaaagattttgcatttcaagagaaccgttatatgagagcaagccctttaataacaaatcctgattaccaatatgtctaaagtaagttgtaatatatgctttatccataaatttgtagcctgcttgtaattcagaaagcttaataaagatttgattctcatattcttcaattaattcaatcttgtcttgataatgactataaaaggtttttcttgtcgtatgtgcttgttgagctaagtcaattacggtaatttcatcaaagcttttcttttcaagcaattcacccatcgcccgataaagcttttgctttgttttcactactctcgcatccgtcataaaactcctcctatatcaactttaaccaagcaaaagttcttctgatatctataaatattttactattagtaaacttgaaattttattaattgctaatacttactactcaaataagcgagaccgtaaaatagtttgtgtaaggatgaattattccttaatttaatttcctaaaacattagaaaaaggagttcctttctcgtatgattggtttgaacaaaaaaaacatacagaaagaagaactccttcatgaatgattttaccaaaaatataactcaagctctattcaatcaagataaaattaatgatttgcttcgtcatgaaatccaacaagctgttaatgacatgttagaatctgaactgactgcctttttaggatatgatccctatgctagaaatggctggaatactggtaattctagaaatggtgcgtatttccgtaaaattgatacccagtttggatcaattgaggtacaagtgccacgagatcgcaatggtatgtttcatcaacacactctgccagactataaacaacatactgatctcttagaagatatggttataaagctttattctaaaggtgtaaccactagagaaatagctaatttgatcgaaaaaatgtatggcagtcattatagtccagctcaagtgtctaatatctctaagcaaatgattcctaaagttgaggcttatcacaagcgtaagctgagcgataagttcttttgtgtttatcttgatacaacgtatataccgttgcgtcgagaaacttttgaacgagaagcagtatatattgccattggcatcaagcctaatggtcacaaggaagttatcgactactgcattgcgcctagtgagaatattgaagtctggacggcgttgctccagaacatgaaatctcgtggtttaaagcaagtagagcttttcctttcagatggcgttgtcggcatgaaagcagcactggcaaagacctatcctcaagctcatttccaacgctgcttggtccatgttatgcgcaacatctgcgctaaagtacgcgtggacgatcgcgaggcaatcatgaacgaattcaagcagattcaccagcaagccaataaagcggctgctgttgatgtattgcatgctttttatgccaaatggaacaagagctacaatcgtgtcattagaaacctgaaagacatcgagccagacctgcttgttttttataattatcctaagcagatcagggcttcaatttactctaccaacatgatcgaatcctttaataacgtcattaagcgcaaggctaagcctaaagcggagttcccgactgaacagtcgcttgatacttttattggcatccaagcaatgagctacaatgaccgctacttcaaccgaattcacaaaggctttggtcaagtccaggataccttagaatcctattttgaataaataaaacgttaaaaaaacaatttacgagaaagatctatttacacaaaaaatttgacagtttccaaataagcagttaatgttacttaacatctacatatttaattacttgttttactttagattgattttgtggttgattaacggccaaaagaatctgtcttaatttgattgatccaatttcaataagagatgccctatcagaactatcaaaataatgaacattatttttcttatctaatgaataatagacttcatcattattcactttaactttatagatagtccctttatttacaaaagcggggacattattagcatctgtaacaagactaacttcaacttgctttgttttaagtgcagttttccaaagctttaaataattaggattatgaacattattacttataaaatctaagacacaaacaccaaattgataacaatttagtgttttcatatcagtattatttttgttaaccagtgaatcaacattagcgggagtaactttttttatattagaatcaacattaattaataaatgatgcttttctccattatcatttgcaagagggagttcttttttaggattgctgcttaccttcgtagtttgtaaatttttcgaacttgtcgaagggatatcattacttaccaaaatatatgtaactccgataattaaaacaaatactatcgctagcaaaccgattatccaagttttatccaacttaattttcgcttttttcatacttattcctccacccaaaactaaatgtttcagtatatatcattataccgatttaaaaagcctttatataatcaaattgaaaataaactacaatacatattaattgtatataatgcttcatctattccataaaaacttaatcaacacttgatccacttgctcgttttcatgaagtttactatgctgccccattttccctaaaatttctttttctgtatatgaattagcatgcggtgctagtaaatacttgagtgaacgtgaggaaacgttagatactatcccatcagaattgctgccatcatttaaattaccataaatgttcaaaatcgatacgcctttaggatataaggatttcatctttagcaattctttgtagatatcattcatttgtttaggtttaccatcatgatccaaagtagtataagaagttttatcataggcaataatcccattaaaatgacctgctatatctacctgtttttccaacttaggcaagctttttctttttccatagtccatcaataagtacataatactcatattccccattgaatggcctactaaattcattttcttataatgatattgcttttgtacagccataattgcggcataagcatacttagcatctgtatgataatcagtattttcgttatccaaatatccaacttttacaattggattttttgcttgtttagaaatagcattttgaatatgagctactccatttttatcaactattacagttaatacatctttagtaacaccagcttttttagccgcatttaccatctgcttttcagcattaatgcttgaaccccaaccatgaaaaaagaaagtcacagtccctttatcagcctgtttaatagtttgaacaggtacattagctttatttttacttgcttttttaactgcagcacaagccgtcaaagtgaaacaagcaaagatgcaagctaaaatctttagtatatttttcatcattgattactcttttctgttaacttaacaaaaaaagcctgcactcaggcagacttttaatgtttaggattatagtaattgatatgtaattttctttctaatttgctaattttagatcctaaaatactgtgtgctaatccactaattaatgctaagaaaccataaactaatgcaccaactactacgcaaattgcaactaaaatcattgcagtaattcgacgatctgctggaatgaatttaccaagaataaattgtaaagcaaaaatcactataaacattattgctgaaaaactcattattccaataaagcgccgtttagttctcttaaaattaaagtgaaaggcaacttttaagtgcttcaaagaaagcaaaattgtaaataagaatgctaaatctgtcgcaatcaaaggtccattaacttggaacaagcgaataagtggatattggattatacacttaacaattagaccaacaactaagtactttatggcaagaatattttctgacaatccctgctgaaccgccattaaaactgtaaataatcctaagataatagctgtaaatgatgcaatgaataacacattactgccaacaggatcaaaattataaaaaatagtgtaaataggcgtactaatagctgccataccaaaagcagatggaatcatgaagaaaaagaataattccaaagtattttcaatttgcttacgaatatcttgataatctcttcttgccttagcacctgataaaagaggaattgcagtaactgccatagctgtggataaagacacaataatcataatcagcttattagcatttagaccaaacaaggcatacatactttcaatctgatcaaaactggcatgaacaaagctagccatgattggatggaacgtatattgatcaactaactgaaaaatattaattcctgaatcaataataataaatggaattgactgttggactatttctagtaataagctattggtcgatacttgtagttcattattagaattttcaactaggttatccatcttagccttttgcttttggtagtaatataccaaaagtaaaattccaaacattgcaccaattgctgcagctaaattagattgggtaactgctcgcaaatagtttccatcttgtatcttcataatgacatatgcagtcataagcatccatgctactcgagcaagttgctcaataaactgcgataaagcactgggcatcatgtcattaaaaccttgaaagtagccacgcatgagactcatcaaaggaatgattaagattgcataagatagactctttaaaactggaacttgtcttgcatcttgtcctgctaatatcggagcaagaccaaacatcagcccagcacaaacaattccaaaacctatcattaagagcaatccacgatgaaatagcttacgagataccccatattcatttaaagcattatacttagcaatttgtttagcaactgcgccaggaattccagccgttgaaactataataaataaactataaatattatagctttgagcagtaattgcattagctaaatttccatcttttcccatccatgcataccatggaatgatatacaatgcacctaaaattcgtgaaagaatagaaccagctgtcatccaagcagaaccctttaaaagctgagcttgggaatctttattttctatatttttattttccatacttttttccattcaagaatgttatgtattaattctactatccaaaaaaatcaaactaatagaattagctctatttaggaaaaaattaacctatttagcaacgatgttaacaatcttgtttggaattacaataaccttcttcacatctttaccttcaaggaatttttgcacgtgatgatctgccatagctgctttttcaagttcgtctttagcagcatctttattagcagtgaacttaccacgtaacttaccattaacttgaaccataatttcaacagttgattcaactaacttggctgggtcaaattttggccattcagcgtaagagatactttcatcgtgaccaagtacttgccagatttcttccatcatgtgaggcgcaacaggtgctaataacttaacaaagccttcagcatattccattggaattgtcttagccttttgagcttcatttacaaagaccatcatttgtgaaatagcagtattaaagtgcaagttttcaaagtcttcagtaaccttcttcacggtttgattataaaccttatctaaactgccatcattttctttaacaaccttatcactaacaattggatctaagtctaagtcattaacaaataaacgccatacacgatctaagaacttcttagttgaagctgggccattgtcatcccagtcaattgaagcatctaatggacccatgaacatttcataagttctaagtgagtcagcaccatattcttcaataacttcatctgggttaacgacgttacccttagacttactcatcttgtcgtggtctttcaagattaaaccttggttgtataacttttggaatggttccttggttggaacaacacccaagtcgtaaagaaccttatgccagaatcttgcgtaaagtaagtgacgaacggcgtgttctgcaccaccaatgtacaagtcaactggtaaccacttcttaaataattcatagtcacctaacttttcattgttgtgtggatcaatataacgtaagtagtaccatgaagaaccagcccagttaggcatagtgttagtttcacgcttacctttacggccattttcatcaactacgttaacccaatcagtcaagttagcaagtgggctttctggggtaccacttggcttgatatctgttgcatgtggtaaaacaagtggcaattcatcttcaggaactaaagtagtttcgccatcttcccagtgaattactggaattggttcaccccagtatctttgacgactgaagtcccagtcgcgaagcttatagttaaccttagcttcaccaaaattatgttcttcaaggtaagcgataatcttcttcttagcgtcagcgatgtttaggccatctaagatatcactatttacgtgaacaccatcatctacaaaggcttctttatctaagtcgccaccttcaattacccgcttcattggtaaatcatgcttcttagcaaattcgtaatctctttgatcgtgagctggaactgccatgacagcaccagtaccataacttgctaaaacatagtcaccaatccaaaccggaacttcttcaccattaacagggttaattgcaaaggcaccagtaaagacaccactcttatctttattcaaatctgttctttcaaggtcagactttgattcaacttccttgatataagcttcaacagcagccttttgttcaggtgtggtaatttccttaacaaggggattttctggagctaagacagtgtagcaaacgccgtataaggtgtctgggcgagtagtatatacttcaaaactcttgtcgctatctttaatcttaaagcgcacttgtgcaccttcagaacgaccaatccagtttctttgcatttccttaactggttctggccaatctaaatcatctaaatcttccaataaacgatcagcgtaagctgtcatcttaagcatccattgacgcatattccggcggtaaacaggataaccacctcgttcagtcttaccatcaacgatttcttcgttagcaacaacagttcctaaatctggtgaccagttaacaggaacttctgcttcataggcaagtcccatcttgtacatttgttcaaagacccattgtgtccacttgtaaaagttaggatcactagttctaacttcacgatcccaatcataagaaaagcccaacatattaagttgctttttaaagttagcaatattttcatcagttacgatagctggatcttgcccagtctttaaagcgtattgttcagttggcaagccaaatgcatcccaacccattgggtgaagcacattatagccttgtgcacgcttcattctagaaacaatatcagttgcagtatagccttctgggtgacctacatgaagccctttaccagatggaaatgggaacatatctaaggcatagtaattcttcttctttggatctgtgccagttttaaaagtattgtgttctgtccaatacttttgccacttcttttcaactactttgtggttatacatatttatcctcctaataaaaaagtcctatgaaaaaatcataggacgaaaattcgcggtaccacctaagttccatgcatacacatgacactcaatagtatcttaaagcgataccagactctgggctaataaaaaggcgagttcaaagcgctacttaaagtcttgcaccaaccgactcttctctaaataagtaactaacttttactactccttaccctttattatcttattgacaataattataatttaccacataagcttaattttaacaaaggtgaatatttatgaaagaaaaaaattatcttacttgttttagtatattagctattatttcaagtgctttttatgcattttgggcatttagtgttgcttatcaggcaagctttattaaagggttcgacaaactttttataaatttaattgctaatcaaaataaaactgaattatttattttgaagcatttaacagttctagctaatactcctgtagtcattggatacaccgtagtcttagtaatatttttacttttgaaaagaaaatatgcattagctggttttagtacctttgtaatggctcttgctaatggaaacaactggctactaaaacatattgtacagcgtccccgtccagcagtttctcatttagtaaaagcaactggttattcatttccaagtggtcattcagccggaagtatgtcaatttgcttagttttatttgtagtggtccttatcttaatgaataaagggctattaaaacgcttattattaatcattcttccaattattccttttattattggaatgagccgaatttatgtccatgtccattatcctagcgatgtacttggaggcttcattgaagcaattacttattttctattagggctattaatttttcaaagtaaattattcaaaaataatgacaaataataacacaaaaggctatcggaaaaatccgatagtctttttgcttgattaattttaatgatataagtcaaatctaccaactgagaaggtctcttttaagccaccagtttccatcaaagacttatcaataataatcttcttcaacgcagatgctaagtagcctttgtagcccacgcccagtgccttacctgcagcttgggtttcaccaatcgcaaccacaacacccaagtcatgatattcatacttagctggacgagcttgttgatttactcggctttgaatatcttttgctgcataattagccattgaaagagccatttgtgcggtgttaggccatcgccacttcttaccaggtaccattacacttgatacatcccctaaaacataaatatcatcactttcaggagcagtcaaatgatctgtgaccattacccggccacgacgattcttaaaccatgacttgtcaattacaggactaccactaaagcctgtcatccaaattctgattccagctttaatttctttagcttgatcatcatctttcatcttgtaaataaccgaatcgttagttacttcttggacaaaggctggcttaataatttcaatcttgttcttatcaagtaagcctaaagcgtaatctaacagcttaccttggaacattggtaaaagacggggtgaagcatcaatcatttgaattcgaatatcttctggtttagcttcagccattttggcaaggcggggtcttgcttcagctaaagcaccagcaagttcaatcgcttggaagcctgcaccacaaatgacaattgataaatgcttaatatcgcggtcttgcttgtaggccttcatttcagcatagatgtggtcacgaattgcttctgcttctttgacattgctcattggcaaagcattttcttttgccccgcgaactcccatgtcacttaagacaaagcctaaacctaaaacgcagtagtcataagcaatagcgccatgattctttaaatcaacagtcttttcatgaatgttaactttttcaacttcatcaacgattaagtctgtcatcttaggatttaagacatcagctaattcataagacatgcgagtataagggtaggctccagaagcaacttcataaagtcgcatagtttcgtagtgataaggatttctatctactaaggtgatatgaacttcattctttaactttttttgtaaagcgacaacagtcttcaaacctgcgtaacctgcgcccaaaactacaatatttttcatagatactcctcttttctattaaattaatgctccgattaaataagtaagtgcataaatcaaagaacccattaagagaatcttaactgcacagataaaagtcttagtttttacctgctcagctaaaaagatgcgagtttgcttataaataattggcgcaattaaaattgttaacattaccgtcattggtgctaacttaagccaaggcaaaataagcactactagtaaagccaaaatgttcttaataacaaaaaacttcaatgcccacttcttaccgataaagtgaatgatagtcttgcggtgattatcttcatcttcttgtgcatcgcaaatattgttagccagcattaaattggatatccacaattcatctggtaaagctagtaaaaatatctttgctaaagttaaaagactccaattaaagacttggtagctatttaagtagacacttaacaaaacaatcataaagcccatagtaaagcctgatgctagttcaccaaatggcaaacttgaaataggtagtggccctgatgaataagcatatcctataaagaagcaaaatactcccatccataaaacagctaatcctgttttataaactaaccatagaccaattagtgccgaaattacagtaaaaactataattaaattacgtactaattttggtgagatattttctctaccgatgatattagttttttgttggtaaacctgactatctgcgtgataatagtcattgtagttatcaagcatatcaaccaccatgttaaacataaacattgcaacaaaaaaggcaattgacactagccaatttatggaatgataataataaatgctataagaaagacctaagataaaaggtaaaacactagcagatttagcttttatttctactagttctaaaaaagtcgcaactgacatcaagccacttcctctcatttttgatgccacttatattatcgattttttatttaaaatagttaaggaaaaatttatgactaattcaaaaccttggaaaaaatatccactaattgccaatgaattagctcaagtaaatgagcttctcaagcaaacaatgcatgcgccaaataagaatttagaatcagcattgaaagaaatggccgataatggtggtaaatatcttcgtccaagtctggtgcttttagcagctcatgctgttggtaaaactaataaacaaattattcaaattgccactgcaattgaaactttacatatggcaactttaatccacgatgatgtcattgatgattctgataaaagacgtggtaaacccagtattcagtttgctttcggcaaagatgttgctgtttatgctggggacttactttttacaaatttttttgacttaatgctagatgtgaatgaacctgaataccttcggctcaatgctcagactatgcgccaaattttaaatggagaacttggccaaatgaatcagcgttttaatcttgagcaaacatttgacgattacctagccgatattaaaggtaaaaccgctaccctctttcgcctagcagctgaagaaggcgctcactttgctgggggaaatctggagcaaacgcaaattttagctaattttgcggaagacttaggaattgcctttcaaattatcgatgatatcttagattatcgtggtagcagtcaattaaataaaccaatgctcgaagacttacctacaggcgtttattctctaccacttttacttaccttaaaacagcccgacttaaaggcacaattattgccacttttaaataagagaactgcaatgactgttaaagatattaagcaaattcaagcaattgttattgatagtggcgcaatcactgaaagtaaacaactagcgcaaaattatgcccaaaaaggtatagctgaactagcaaaattagcaccaaatcctgctgttaaaattttagaaaaaatggcaaaagaacttttgcaaagaactttttagctgatcaaagaccttggtcagctttttttagttccctaaagcgactactattttcccataattcatttggactaccttggatgacaatttgaccatgttcaataaacaagacttggtccatcttatcaattccttgcaagtggtgtgttatccaaatcattgttttcccaactaattgctgattaaaggtgtcaataacagcttgttcagttactgagtctagccctactgttggctcatctagtaaaacaattggagcatcttgtaataagattctagctaaggctaaacgatgacgttcaccaccagaaaaacgcaaccccgcttcatctactttggtatctaacttttgaggcaattttttcaccatttcaagtaagccaactctatctaaggcatcccaaatttgctcatcacttgctgtttcattacctaaacgcaaattgttagcaatcgtggtgttaaacaagtaaggcttttggttaatcacactaaaataattagcaatttgatcaccaaatttggcagttggaatgccatttaagctaatgctaccttgactaggtaaccgatctccgcgcagtaagctagctagcgtgctttttcctgctccactttggcctaaaattgctattttttcaccagccactatcttgagattaatcccgcttaaaacttctttatcagtcttaggataagtgtaatgaacatcctttaaaagtaagttatatggagcttcaatttgaattttttcgttattagtaattttttctgtttttaacttatttagccgtcttagtgatttttcatagacattagtctcttgtcctgcagcaggtaagccagcaattgcttcgtttaatggaaataccgctaaaacaaaagctgcaatccagttagtagcatgagcaaatttaccagcaccccaaataattaagctgacaataactaacaagtaaaacatttgaactataaaattccgtttacgttcaaaactctttatttgttgttgaacttcaaccatcttagcttgattatcaacatgaagctttaagaattcttggctacgtcctgaaaggacccaatcactaacccccatcacattatcagtcaagtcgacatagagtcggtcacgtgcctctttttcaaagctttgcttagacccattaacaataattgaccagataggaatagcaaaaatcataattccgaaaacaagaagcatccataaacccattaacggtgttaaaaagccgagtgcaactactataattgcatataagccccaggcaacaaacattggaaaaatagaccgcaaatatagattttgaatgtgactaacatcatctgaaagaagtcctaagatatcacctagttgatatttactattaaacttagttgcatctacttctaaggcatcataaaggttctgtctaaacttcgaagtcatctgaaagacccagttatgactcgccaatctttccaaatattgcaaggctggtctaccaattccgaaggctctagtcaaaacaatcggcacataaactagcaaaatattttccggcttggtggcagacttactaattaaaaagcccgcacaaaacattaatcccgctgcacaaacaaaagttagaatccctaaagaaattgcaaggactaatgtttttttgtatcgcttcaaaaacggcttaacccatcggtcctctttaagcgcttgaataattggaattttgttaaacattcttagtcccccgcatttcttgcgttaatttggtaaaataacctgcttcttttgttaattcgtcaaatgtgccttgctgaaccaacttgccttcatgcataaccaaaatataatccatttcttttaaccagtgcagacggtgagtagcaaagatgactaatctattttccattagtggcaacatttgcttcttcaaatcaacctcagtttctatgtctaagtgagcagtcggttcatcaaataacattacttttctagttttatctaagaatgcccgcgcaagtgcaattctttgtgcttgtccacctgataagacccgcttaccttgaccgataattgtatcaagtccttctggcagttctgatactaattcatctaagctcacgacatgaatcgccttcataatttcagcatcacttgcctcaggagtatagaaggcaatattttcacgtaaactagcagtaaaaacgtaaggattctgcggaatataaagcatctgctgatgccaagctggaatatttaaagttgcggctttttgtccatcaattattatttttcctgattttggtggtaaaaagccacttaataaattaatcaaagttgacttaccagaaccactcatcccaataataccaactttttcatagcccttaatttcaactgaaactggccctatttcagtttgattattatagttaaattctaagttttctaacttaagttcactctttgaattccaaggttcaatcgctaaatcagcactagcttgcattgggcgactaattaattcattaattcgcttgaaagcattcttaccatttaaggttgcatgataatcactagcaaaatttctgattggtaagaaatactcaggcgctaaaatcagaattgataaagctggatataatggcaattgtccatttaaaaggccaaagcccaaatatactgctacgacagcaattgatagcgtagtaaagaaatctaaggcaaaagttgaaagcatcgccactttaaggactgccatcgttttatggcgaaaatcttcgctgacacgaaaaatactttttgaatatcttttactcaggcctaaatatttcaaggtatcaattccacgtagtgaatcgataaagttattagatagtttttgaaaatcaccaaattgcttacttgcccggtctttagcagcataacccaaaatgatcatgaacagtacaatcagcggatacatcaataacagccccagagctgactgccagttaataaagagcatggcaataaaaagcaaaataggaattatcatcatcgctaaaactttagtataaatcagcttgatataatcccgaacttcatcaattccatataaagccatcgtaattaaactcccagtcccttggctttgaactaaggattggccagatttaaaaatcttatttaataactgctgacgcaacttttcgacttcttgactagaataagtttccagcattttatctttaagcaaatcaattagctgtctaccagtaaggcaaacaataaagattaatagatactgccagtttaacttcttcccttgccaaagagttgttaaaactgcacttaacgataaagcctggccaataatcaaaaaagcctgcagaacttcaagtactgcaagctttttcaaaattgaaccagcaccagcaagtttaaataggtgttgatcaatcatcttaatatccttctcctactgcaggcatctcgattctcttgcggaaaatccagtatgaccaaattgtataagcaagaacaattggaacgaaaataaaggttgcaattgtcataactgtcaaagtgtaatttgatgatgaagctgtcttaatcatcaaatcaaagttactgctgatagatgaaatcattaatcttgggaataatccacagaaaatcaaagctaccaatgaaattaaagttaagccactaaatgtgaaggcataaccttgatgattgctaaagactgagacatgtccagcaactgagaatgctacaattagcactaggcaaatcaaagtcaaaattggatgtaccttgataaagtcagtttgaaatagcaataacaaggcaaagaccacttcgcctgcgtaaagtacccaataaagtgcttgagcatagttgcgagcgcgatcacagataacgcctttagttctcaaaacaatataattcaagccatgaaggtacgttaataaagttaaggcaatgccgccaacaactgagaaccagttaaagtaatcaaagaagctagcgctcatattacctttagcatcaattggcatacctttaatcattgagacaaacattactcctaagaaaaatggagcaataaaactacctaatgccaaagcattatcccaaatccttttatttggttgagaactttgagctctaaattcaaatgaaacaccacgaataattaaccctaccagaatcaataataagattaagtagtagccggaaaacagtgaggcataccagtatgggaatgatgcgaacatcgcaccaccagcagtaattaaccatacttcattaccatcccaaactggcccaattgtttgaataacttgacctctttcttcgtcgttatgagctaaggttttaactgccattccgacaccataatcaaaaccatctaagaagaagaagccactaaatagaactccaattaggataaaccaaagaatttgtaagactgacatttagaaggccccctttgcaaatggatcagttgcaaaactagcttgatccttcttagccaattcatcagggtcattgtgtaagtagcgaataattaagctaattaaaacaacagctaaaccagtaaataagcagaagtaaacaatatttgaagttagcaatgaagcaactgaaacatttggagaaacactttgttcaattgtaaataaaccataaactgtccaaggtgcacggccaagttcagtaattaaccaaccacaagtgttagcaataaatggtgtaaaggtcattaatgctaatacccataaacaccaacgatgttcatataagctttgcttcttcttgcaagtcataactaaacctacaattgaaactaaagccattaatgaaccaaatccagccataaagcggaagctccagaatagggtattaactggaacatagtaattcatcttatgaccggcaatatgggtaccataacgcttttcaagttcagagttgatttcttccatacccttaactgagcctttagtgctgtggtaagaaagaatactcaacatatcaggaatttcaatcttgcctttcacttcgtgagtcttcggatcagcaaaccccacaacagtccaaggagcttcatcacctgttgtcttatatactgcttcagtagccgcaaatttcattggttgatcatgaacaagggcttgcatttgtacatcccccatgccaattgaacctaacgagaaaattagcattaagagaagacctaaacgcattgtcttatgatagatttcttggttaacagctgataagtttttcttcttaagtaattgaaaggcagttaacccagtaataattgttgcaccagttaaaagtgcaccagttaacacgtgtcctaattccaaaactaattgcttattagttaataaggcagcaaaatcaaccatttcagctctaccatttctaatagtaaagccaactgggtgttgcataaatgagttagcagctaaaatccatagtgaagaagtaactgtcccaaaaacaatcatccaaataaagaataagtgtaactttttaccaaccttattccaagtaaacatccatagtccaatgaatgttgattcaataaagaatgataataatgcttcaaatgctagtggagcaccaaaaatatctcccataaatctagcataatcagaccaattcatcccaaactggaattcttgaataatcccagttacaacacctactgcaaaactaagtaagaagatgtttccccaaaatctggtcatctttttatactcatctttgccagtatgaacatacattgattccattacagcgactgtaaacaccgtaccaattgaaaatggtacaaagaaaaagtgaaaaatcgttgtcattgcgaattggaatcttgcaagactaacaatattcattctagacacctccaaaaaatatattattatttatttggaaagagcaataataatatattcactcaatcacagtttactgcttgttgaaatcagtttcaagaattataaatataataaaagtgcgtaatatcaattgatattacgcacttttattttgttcgtttattttttactttcatgataagttatgttaattacaaatgccaaaataattactatcaaactagtaatataaacactctgtaaacttatatgtaggacattccgtaaatctggtaccaagtccttagctaattgatgaaccttttgtgaattaaccaccttgttcatcatcgacatatttaaattagaatgcttacttaactgatgggccattacactgttaaaaacaatcccataaattgaaaccataacagtttgtcctaaatatttcataagagtattaaaagcagtggcaacaccaatattttcttttcctacaattacttgacttttaacttgtgtagttgtagcaatagtcccaaaagttagtccatgtaaaaaggtaatagcgcaaaacaccccaaattgtgtatatgttggtattactaccaaaactaaatccgctataaataagaatattaatgaataggatataagcctttttgaccccaatttgggcattaagctacccgcaataaaagaaccaatcacccacattaatgcacttggcgttacagcaaaccccgcaatagatgcaggtaggccatttattccttgcatccacgttggcaaataaaattcaagtccaattactactcccataatgagtagcgtaattgcattttgcgcaacaaattctttatttttaaacatttcaagtggcattattggatctgtagctttttgttctgcctttttaaaaaagaaaatagaaacacaacttaaagttagtaagcttattagcaacaatactgaataattttcacttaagccctgcaaaaagagcataaaagcaagtaagaaactaactaaaaaaatagttcctctaagatctaacttaccgtccttagggacaatcttttctttaaagaagaaactgattaatagaaaagctaaaacaccaaaaggtaaattaatataaaatacccaatgccaagttaaatgttggacaataaatccaccaagtaaaggagcaattactgacgctaaaccccaaaaacttgaatttagtcctatcatttttgcgcgcttatgaagtggatacatatcagccagcattgtaattgcaactggctgaattgctcctgaaccaattccttgaatcactctaaagacaattaactgaagcatattatgagaaagaccacataaacacgatcccaatacaaaaaccaaaattccgaatagaaaaacgggttttcttccaaaacggtcagccatcttcccatataatggagttgaaattgcagtcatcagcaaaaatattgaaacaacccagttcataatttctaatccatctaaatcagaaacaatggttggcattgcagttgaaacaattgtgccttcaactgcactcataaaagtagttaaaaagatagcaaaagtaacaattgcaactttctttttttccatttatatgacctactaattttccttaatgtaatctaaaatttcttgggttttatcagttctttcccaaggtaaatcaatatctgttctaccaaagtgtccgtaagcagcagtttgacgataaatcggacgtcttaaattgagcatttcaataattcctgccggtcttaaatcaaatacagatctaactgcttttactaaaacatcatttgccacttttcctgttccttcagtatcaattctaattgaaacagggtgtgctacaccgattgcgtaggctaattgaacttcacatttcttggcaagtcctgcagcaacaatattttttgcaacgtatctagctgcataactggcactacgatctacttttgtagcatctttaccagagaatgcaccaccaccatgacgtgcataaccaccataggtatcaacaattatttttcgaccagttaagccagaatctcctttgggtccaccaataacaaagcggccagatggattaattaaatattttgtatcatcatctagaagttcattaggaataacagttttaattacatcttctaccattgcgcgcttaatttcttcatttgaaacttcagcatcggtttgagtagaaataacaactgtatctacacgcttaggttggtcattttcatcatattcaacagtaacttgagctttactatcaggtcttaaccaagtaagaatattcttttttctaagttctgcaacttttctcatcaatcggtgagccaatgaaattggtaatggcattaattcaggagtttcatcaattgcataaccaaacattaatccttggtctcctgcacctattttatccaaagcatctgaatcattagtgtcacgagtttcaattgagtgatcaactcctccggcgatatctggagactgttcatcaatatcaaccataacagcacaattattaccgtcaaaaccaagacttgggtcgttataaccaatatctaaaattgtttgacgaacaacactctgaatatcaacatatgctgaagttgaaatttcaccaaaaacaaagaccataccagtagtaacaatcgtctcacaagcaacacgcccatttggatcttgctttaaaatggcatctaaaacagcatcagatatctgatctgcaatcttatctggatgtccttctgaaactgattctgaagtaaataaacgtttttccataatgtcctcctatagacaagctattcggttacaaggcatcttcgcattacgaatcctatcaggacttgaaccgatctaataaattgataattctaataattcgttcctatggtataaaaaaagaaccacctaaacggtggttctttaggaactatggaggatacagggctcgaacctgtgacctcctgcttgtaaggcagatgctctcccagctgagctaatcctccataaatgacccgtacgagatttgaactcatgttaccgccgtgaaagggcggtgtcttaaccacttgaccaacgggccagatccctcgagcacgaatattaatatatcaaaattattgataattggcaagtcttttttacaaaaaacttgattcgctttcaagctaacggagtgtgagggttctcgcctcagcactcttaaaataatatcatatccgaaaatactgtgcaaccctttttttgtatttatttcaaaatatagttattcggtttttttacgtagcttttacgtagcttttaacattagcagttatgatattataaaagaaaagataactaatttgacaggctagaaatattatagagaaaaatttatgaaactgaatattattttctctaactagctaatttaactaaaaaaaactattacggagaaaactattatgaaacgaaaaatcacgatttttgaacgtatggcaagagaagaaattgctaaaaatattaaaacttatatggccttacgtggaaaaatctcacaaaagaaactttcagaacttactggaatacctgcaagcactatagcaaattattctaatatgagcagtacccctgctccagaagcagttaaaaaaattgctaaagccttagatgttgctccagaagatattgatccacgtttagttaacattgaagaaatgaaaaacgtaattcaaaattcaaaacaaatctctaatttggaaaaagaaaattttagaactaatttgagatttttgatgaaagagaaaaaaattaccgaacgtgaaattgctaaaatgaccggctatacactaataagtatttcatactggctaacagggcgcactaccccacctactgaagcagccacaaatatttctaaagctttaaatatacctatatcaagtttactatctaagccttcagagaacttaaaaatggcgattttagatgctattccagatgacatcactgaatcagaagcaaagaaaataattgatcttattaaagaaaagaaatacttatagttatattcaaaaaatagaaaaggcgcctttaacgaggcaccttttctgatattttagttccacatacatttatatcagtaataataaatgcgattacatatgttgctacatatataaattacactaccactttagatatagttaacttaatttgtaagcctaaacctttagcatatttgtttaaagtttctaatgtaggtgtgctatcaagtttttcaattctagcaatttgaggttgagtcaagcctgtccttttagctaactctgtctgtgaaataccactttttagacgttgaacctgaagaaaagaaagagcatttataacagaaagttcttcatcaggaatagcggtttgattttttaaaattgttttccattttttcattttatcgaccatacctttcataccaatcatctaacaaatcaattgcttttcttatttgcttaggatcagtcttattttctttttttgtatagtgattcaaaataacaaatttatttttatcccatgtcccgtaaaaaactctttcaggcataggtcttaattctcacaatggatatttatagccttttagatacttagattgtggttctcctaacatctctagcatattgatttgatgaaccaatttcttatagatagcaatttcatctttttgccttgattgagaaatattagttacatagtcaaaagtatcactatttccattcttatcttcatagaaaactacttcattcatttaagtgaccttctaatatagattacgatataattatatattcaatagcataattattcaagcgaggtagttaacatttagaatctgactaaaatattagcaaaaattaaggggagcagtcttttgactaatcatttatataccctatgatatcactgaagaagatgcaaaagatcattctctttattaaagacgcaaaatatttataattgtatttgtacgcgtggtgctagttaaatctttctagacaataagccaaattataagctaaaattgcaatttccaaccggctttgaaagcctatcagactacgtgctcgattgttctcggcattgtaataggtcagaagcgaaaagtcgctttcaattgttctgcgaatagccatcaattgatgatcattgtgctttttagctcctgtcatatttttacgatatggtgtccaaagttcataacccatttgttttagctgttgatgcagttctttgcctaaatagccttcgtcgccaagaagatagtaattagatggatgggtattttccatcagttcaactgtctccttggcatcatgaactgatgcttttgttacgacataatcaagaatgtaaccgtcatcgctaacaatgacatgaactttgaaaccatagaagtaaattttcttggtggccttataaccaatgttggcataaccgcgaaaaattttagcacgatagttgcgaattggttggcaaacaggtaccggaaagctgtcaatgatcaagaactgtccattcaggtcaacctttttattcatttcttgccgtatctgataaatcaattgcaatagctgacgtgaacgtcgattaaaacatgagtgtgataaacaattgaaacattcacagaatcttctttgtgattcaattcctgtcttagcttgccagataagtaaagccaaaatcagactgtccgtagttttaatttgatcaatatttcgccgatgagtaaactcagccggtgcatacaaacgataccagtgccgacaaattatcactaaatctttaaaactaacttgtaaatggtggctaaaacgcttaagcttaaggcagttcaattagatcagactcttttctattattactatttacaagtcgagtctagtccgattggacttttttattaactaaaacgatttaactagcaccacgcgtgtataataaattgtgtcttagaaagagggtataaaatttggacaaattacataagcaacaagtggcaaaacgacaacgatttgccattaagaaattaacagttggaacggcatctgtccttgttggcttaaccttcattattagtgataatgccaaggcagataatacgacagttgctgctcaaaatacattcacgactcaagtgactgatccacaagttagtgcccattcaagcaatattcggattagcgacgaatcaaatacggttgttcatcaaacttcatcaacattagttccaaataaaacaacaacgccagcgcaacaaatgccgataatccataaaacacagcaaaacaaccactgcccagtaagtacaacaaacacagcaaaacaaccactgcccagtaagtacaacattactattaattttcgcgatgtcaccctacataagccaattcaagtgattagtaatggtcattatgtattcaaacaacctttcaagcagaccgcaattcgaccaggggatagtatggatcaagaatttactgtggccggttataaattaatgaattcagaagttttgaataagtatttctattttgataaacaaggtaatacctaccttaagaaaggtattactacgcaagacattaacattaatttagattacgcatcattgtcaccaatcaaaatagagtatgttgatgtagataacgggcatattttagcatcaatcgttctagatagtttctggatggcccctgaatctccacaacaccgtgctggtgataagaaagcaccggatgcatcacgctatgaagccgcagccattaatattcctggatataaattagtttctgaacctgttttaaagggtaaaatcactggtcaaactcgaaattcgttagctgatcctaactatgtttatttaactttcaagtataagaaggttatgaaaaataattctgatagtaataggactgaattgttacttgttccagaagaaacaaatctaccgtacaaactctttacgattgctggtagctatggcgaaaggattgacctaaacaatggtaattatgagaaaaaaatgagtgaggagattagccattgcgaaaaacaaggttactcctatataggaagtacagggacatatcttaattctgattatttcaattggtacgctaaaggtatacatgtttacttgctaccaaacaaaccagtaactgtgaggtacattgatgagcaaggaaatgtgcttaggaataatgatacgcttgcgttcaacctagataatcctaaccaaaaaaataatggggttaatccgcaaaaaggctggtatgcaaagggtccatggcaagtccaacctaagaaaattaaaggttatcgtcttgttcgtactcttggagcgacgagtggccagtatactgtataccagtacatcacaacttttgtttacactaaggacacagatccaactgatcccaaaacgccagagacaacaacaactgatccaaagacaccaagcgataagcttccggacaatcctggcaagaactatccaaagggtgttaacacgactgatttgaataagaccatcacgcggaagattactgttatcaagcctgacgggacaaaggaagcccatgaccaaacggttaagtataaggataaccaactaccacaaactggtaatgacaatagcttaacaaaggacacagatccaactgatcccaaaacgccagagacaacaacaacaactgatccaaagacaccaagcgataagcttccggacaatcctggcaagaactatccaaagggtgttaacacgactgatttgaataagaccatcacgcggaagattactgttatcaagcctgacgggacaaaggaagcccatgaccaaacggttaagtataaggataaccaactaccacaaactggtaatgacaatagcttaacaaccgttgcctggattattgtaagcctgttaaccagttgcttagctgttcttggcattaataaacatcaaggctaatatgattacctaccaaccattccgaagctaatcaagacgcgatgctttaattagcttcggaattttgaatgatatatcattataataggatacgcgtggtgctagttaaatcgttctaggcaatatgccatattataagctaaaatggctatttccaaccggctttgaaagcctatcagactacgtgctcgattgttctcggcattgtaataggtcagaagcgaaaagtcgctttcaattgttctgcgaatagccatcaattgatgatcattgtgctttttagctcctgtcatatttttacgatatggtgtccaaagttcataacccatttgttttagctgttgatgcagttctttgcctaaatagccttcgtcgccaagaagatagtaattagatggatgggtattttccatcagttcaactgtctccttggcatcatgcactgatgctttagtgactgcgtagtcaagcaaatagccatcatcgcttactagcgcgtgcaccttgaaaccataataatagactttcttggttgctttatagccaatatcggctatgtcacggaagatcttaacacgataattacgaacaggctgacaaactggaacaggaaaactgtcaataattaaaaattctccagcaacctttacctcttgattcccagcttgacggatgcagcgaattaaaggcaaaagcatcttggctcgacgattaaagcgagaatgagataagccaacaaaaaatttacagaatcttctttgggattcaattccaatttcagtttgccaaatgagcatcgctaagatggagctgtcggaaagctttgtttgatcaatgttttttcgatgcgtaagcttatcaggcgcataaagattatatagtgaacgacaaattacatttaaacgactaaaactaacttgtaaatggtgagagaaacgattaagcttgaggtagttcaattagatcagactcttttctatttaatttacttacaacttgagtctaatccgattggactttaactaaaacgatttaactagcaccacgcgtaataggatggaataaactttatataaatataagtaatggggattgatttctaatcttttaagaatactgtttatggttgattttttatacaatgtttccaactgagagtaaatataaaaaaggagatactatgttatcagcaaagaattattacggccgtctggtaaagttaaaaccaaaacaagatcatttttcacttcgtaagttatctattggtcttatttctgttaccataggtattaccttatacttgggagtggacaactcctatgttatggctgatacgaatttgagggataataacaatcaacaattagccggatcgggtaatggcaccaatataataaatgataaagttaaaattccaaccggtgcttttcagtctaaacaaatgcaaactgaaaattgcaaagtaaataatcagatgttggataaaactgaagtaacaaattctactaaaaattcttctacactaaatgtggaaaattccaagactgctgatttgtcgagatttgattactctttatatacaaaaaaagtaaagagttttgaatttagaaattcagataataacgatgtaattagaacagtaatattaaacaaacctaccggtgttgaaactgtaactatgactttgaatgttagctgcttaaaagggagaaagcatcagcatcaatcgcacacatctactagatcgagtatttataattataaacctcaagttattgctgaagtaaatacatccaataatccatcgccaaaaatatcaattttggagaaaaacgttttaccaaaaactttttttcaagtagataagaatacatttcttactcaacaggataaagagaactatgagaaatttatatcagttaataagaatgatattagcatagaattaccagctttttccattaatgatattgatattccaggctattcttatcatattaatgcaaaaaagactactcctggagcaggattaggtaaagaaaagttttacatctacactgaatcaccacaaacagttgttatcgactataccccgattacggttaaggttgaacataagatcatcacggtaacaccaaacgatccgaagacaccaagcgataagcttccggacaaccctggcaagaactatccaaagggtgttgacaagactgatttgaataagacaatcacgcgaaagattactgttatcaagcctgatgggacaaaggaagcccatgatcaaccggttaacctcacccggactgctaccgttgatgaagtaaccggcaaagtaacttatagggactgggtaccaggaacctgggataactttgatgtgccagccgtatctggctacacaccaagtcaaagtaacgttccgaaacaatcagttactgatggcactaaggatactactgtaacaattacctacacgccaaacgaacagactgggaagatcacatacgttgatccaaacggaaaaaaagttggtactaccctattaacaggaaagacggatgaaaagattccggttacaccaaacgttcctgctggttggcaagttgttcctgatcaaaagattccaacaacaatcaccgctactccagacggcatcacaacagttacggttaaggttgaacataagatcatcacggtaacaccaaacgatccgaagacaccaagcgataagcttccagacaatcctggcaagaactatccaaagggtgttgataagaaagatctgaacaagactgttaagcggacgattactgttaataaaccagctggctcaactgttgatgctagtcaagagactactctaactcggacggctactgttgacgaggttacaggccaagttacgtatggcaaatggacaacctcaaagcttgataagtataatgcaccagaaattccaggttacactccaagtcaagcagaagtccctgcagttgatcaggtaacggttgattacacagatccaaaaattgaaattacctacacgccaaccgaacagactgggaagatcacatacgttgatccaaacggcaaagaagttggtactaccccattaacaggaaagacggatgaagagattccagttacaccaaacgttcctgcaggttggcagattgttcctgatcaaaagattccaacaacgatcaccgctactccagacggcattcaaacagttacggttaaggttgaacataagatcatcacggtaacaccaaacgatccgaagacaccaagcgataagcttccagacaatcctggcaagaactatccaaagggtgttgataagaaagatctgaacaagactgttaagcggacgattacgtctcaaccaacgacagctaaggataaccaactaccacaaactggtaatgacaatagcttaacattaatgggcttaggtgcctccaccttattgggaatgtttggccttgctgctgtaaacaagaagcgcaagtaatcaaattagctctacaattttacccctttgtcagtactgatgaggtattttgatgaggttagtttaagtagcgaagctgcttgagctgaccttttcttttagcttagtttttaccatgagatttgagagctagtagacttcggatacgggaatgatcaaagttgcgaaaaccataagctgttattctagtggtcttaattttattattgtaagcagtcgttatcaatacgggttgaacaaagggactctacaattgtaagtactgatgaatttaacatcagtgcttattttggttttctacgaatagtcaaggatattaaaggaattccttggaatttagctggatagaaaagttaattaaatacgcgtggtgctagttaaatcgttttagttaataaaaaagtccaatcggactagactcgacttgtaaatagtaataatagaaaagagtctgatctaattgaactgccttaagcttaagcgttttagccaccatttacaagttagttttaaagatttagtgataatttgtcggcactggtatcgtttgtatgcaccggctgagtttactcatcggcgaaatattgatcaaattaaaactacggacagtctgattttggctttacttatctggcaagctaagacaggaattgaatcacaaagaagattctgtgaatgtttcaattgtttatcacactcatgttttaatcgacgttcacgtcagctattgcaattgatttatcagatacggcaagaaatgaataaaaaggttgacctgaatggacagttcttgatcattgacagctttccggtacctgtttgccaaccaattcgcaactatcgtgctaaaatttttcgcggttatgccaacattggttataaggccaccaagaaaatttacttctatggtttcaaagttcatgtcattgttagcgatgacggttacattcttgattatgtcgtaacaaaagcatcagttcatgatgccaaggagacagttgaactgatggaaaatacccatccatctaattactatcttcttggcgacgaaggctatttaggcaaagaactgcatcaacagctaaaacaaatgggttatgaactttggacaccatatcgtaaaaatatgacaggagctaaaaagcacaatgatcatcaattgatggctattcgcagaacaattgaaagcgacttttcgcttctgacctattacaatgccgagaacaatcgagcacgtagtctgataggctttcaaagccggttggaaatagccattttagcttataatatggcatattgcctagaacgatttaactagcaccacgcgtatcctattataatgatatatcattcaaaattccgaagctaattaaagcatcgcgtcttgattagcttcggaatggttggtaggtaatcatattagccttgatgtttattaatgccaagaacagctaagcaactggttaacaggcttacaataatccaggcaacggttgttaagctattgtcattaccagtttgtggtagttggttatccttatacttaaccgtttggtcatgggcttcctttgtcccgtcaggcttgataacagtaatcttccgcgtgatggtcttattcaaatcagtcgtgttaacaccctttggatagttcttgccaggattgtccggaagcttatcgcttggtgtctttggatcagttgttgttgttgtctctggcgttttgggatcagttggatctgtgtcctttgttaagctattgtcattaccagtttgtggtagttggttatccttatacttaaccgtttggtcatgggcttcctttgtcccgtcaggcttgataacagtaatcttccgcgtgatggtcttattcaaatcagtcgtgttaacaccctttggatagttcttgccaggattgtccggaagcttatcgcttggtgtctttggatcagttgttgttgtctctggcgttttgggatcagttggatctgtgtccttagtgtaaacaaaagttgtgatgtactggtatacagtatactggccactcgtcgctccaagagtacgaacaagacgataacctttaattttcttaggttggacttgccatggaccctttgcataccagcctttttgcggattaaccccattatttttttggttaggattatctaggttgaacgcaagcgtatcattattcctaagcacatttccttgctcatcaatgtacctcacagttactggtttgtttggtagcaagtaaacatgtatacctttagcgtaccaattgaaataatcagaattaagatatgtccctgtacttcctatataggagtaaccttgtttttcgcaatggctaatctcctcactcatttttttctcataattaccattgtttaggtcaatcctttcgccatagctaccagcaatcgtaaagagtttgtacggtagatttgtttcttctggaacaagtaacaattcagtcctattactatcagaattatttttcataaccttcttatacttgaaagttaaataaacatagttaggatcagctaacgaatttcgagtttgaccagtgattttaccctttaaaacaggttcagaaactaatttatatccaggaatattaatggctgcggcttcatagcgtgatgcatccggtgctttcttatcaccagcacggtgttgtggagattcaggggccatccagaaactatctagaacgattgatgctaaaatatgcccgttatctacatcaacatactctattttgattggtgacaatgatgcgtaatctaaattaatgttaatgtcttgcgtagtaatacctttcttaaggtaggtattaccttgtttatcaaaatagaaatacttattcaaaacttctgaattcattaatttataaccggccacagtaaattcttgatccatactatcccctggtcgaattgcggtctgcttgaaaggttgtttgaatacataatgaccattactaatcacttgaattggcttatgtagggtgacatcgcgaaaattaatagtaatgttgtacttactgggcagtggttgttttgctgtgtttgttgtacttactgggcagtggttgttttgctgtgttttatggattatcggcatttgttgcgctggcgttgttgttttatttggaactaatgttgatgaagtttgatgaacaaccgtatttgattcgtcgctaatccgaatattgcttgaatgggcactaacttgtggatcagtcacttgagtcgtgaatgtattttgagcagcaactgtcgtatctgccttggcattatcactaataatgaaggttaagccaacaaggacagatgccgttccaactgttaatttcttaatggcaaatcgttgtcgttttgccacttgttgcttatgtaatttgtccaaattttataccctctttctaagacacaatttattatactatacgcgtggtgctagttaaatcgttttagttaataaaaaagtccaatcggactagactcgacttgtaaatagtaataatagaaaagagtctgatctaattgaactgccttaagcttaagcgttttagccaccatttacaagttagttttaaagatttagtgataatttgtcggcactggtatcgtttgtatgcaccggctgagtttactcatcggcgaaatattgatcaaattaaaactacggacagtctgattttggctttacttatctggcaagctaagacaggaattgaatcacaaagaagattctgtgaatgtttcaattgtttatcacactcatgttttaatcgacgttcacgtcagctattgcaattgatttatcagatacggcaagaaatgaataaaaaggttgacctgaatggacagttcttgatcattgacagctttccggtacctgtttgccaaccaattcgcaactatcgtgctaaaatttttcgcggttatgccaacattggttataaggccaccaagaaaatttacttctatggtttcaaagttcatgtcattgttagcgatgacggttacattcttgattatgtcgtaacaaaagcatcagttcatgatgccaaggagacagttgaactgatggaaaatacccatccatctaattactatcttcttggcgacgaaggctatttaggcaaagaactgcatcaacagctaaaacaaatgggttatgaactttggacaccatatcgtaaaaatatgacaggagctaaaaagcacaatgatcatcaattgatggctattcgcagaacaattgaaagcgacttttcgcttctgacctattacaatgccgagaacaatcgagcacgtagtctgataggctttcaaagccggttggaaatagccattttagcttataatatggcatattgcctagaacgatttaactagcaccacgcgtatcctattataatgatatatcattcaaaattccgaagctaattaaagcatcgcgtcttgattagcttcggaatggttggtaggtaatcatattagccttgatgtttattaatgccaagaacagctaagcaactggttaacaggcttacaataatccaggcaacggttgttaagctattgtcattaccagtttgtggtagttggttatccttatacttaaccgtttggtcatgggcttcctttgtcccgtcaggcttgataacagtaatcttccgcgtgatggtcttattcaaatcagtcgtgttaacaccctttggatagttcttgccaggattgtccggaagcttatcgcttggtgtctttggatcagttgttgttgttgtctctggcgttttgggatcagttggatctgtgtcctttgttaagctattgtcattaccagtttgtggtagttggttatccttatacttaaccgtttggtcatgggcttcctttgtcccgtcaggcttgataacagtaatcttccgcgtgatggtcttattcaaatcagtcgtgttaacaccctttggatagttcttgccaggattgtccggaagcttatcgcttggtgtctttggatcagttgttgttgttgtctctggcgttttgggatcagttggatctgtgtccttagtgtaaacaaaagttgtgatgtactggtatacagtatactggccactcgtcgctccaagagtacgaacaagacgataacctttaattttcttaggttggacttgccatggaccctttgcataccagcctttttgcggattaaccccattatttttttggttaggattatctaggttgaacgcaagcgtatcattattcctaagcacatttccttgctcatcaatgtacctcacagttactggtttgtttggtagcaagtaaacatgtatacctttagcgtaccaattgaaataatcagaattaagatatgtccctgtacttcctatataggagtaaccttgtttttcgcaatggctaatctcctcactcatttttttctcataattaccattgtttaggtcaatcctttcgccatagctaccagcaatcgtaaagagtttgtacggtagatttgtttcttctggaacaagtaacaattcagtcctattactatcagaattatttttcataaccttcttatacttgaaagttaaataaacatagttaggatcagctaacgaatttcgagtttgaccagtgattttaccctttaaaacaggttcagaaactaatttatatccaggaatattaatggctgcggcttcatagcgtgatgcatccggtgctttcttatcaccagcacggtgttgtggagattcaggggccatccagaaactatctagaacgattgatgctaaaatatgcccgttatctacatcaacatactctattttgattggtgacaatgatgcgtaatctaaattaatgttaatgtcttgcgtagtaatacctttcttaaggtaggtattaccttgtttatcaaaatagaaatacttattcaaaacttctgaattcattaatttataaccggccacagtaaattcttgatccatactatcccctggtcgaattgcggtctgcttgaaaggttgtttgaatacataatgaccattactaatcacttgaattggcttatgtagggtgacatcgcgaaaattaatagtaatgttgtacttactgggcagtggttgttttgctgtgtttgttgtacttactgggcagtggttgttttgctgtgttttatggattatcggcatttgttgcgctggcgttgttgttttatttggaactaatgttgatgaagtttgatgaacaaccgtatttgattcgtcgctaatccgaatattgcttgaatgggcactaacttgtggatcagtcacttgagtcgtgaatgtattttgagcagcaactgtcgtatctgccttggcattatcactaataatgaaggttaagccaacaaggacagatgccgttccaactgttaatttcttaatggcaaatcgttgtcgttttgccacttgttgcttatgtaatttgtccaaattttataccctctttctaagacacaatttattatactatacgcgtggtgctagttaaatcgttttagttaataaaaaagtccaatcggactagactcgacttgtaaatagtaataatagaaaagagtctgatctaattgaactgccttaagcttaagcgttttagccaccatttacaagttagttttaaagatttagtgataatttgtcggcactggtatcgtttgtatgcaccggctgagtttactcatcggcgaaatattgatcaaattaaaactacggacagtctgattttggctttacttatctggcaagctaagacaggaattgaatcacaaagaagattctgtgaatgtttcaattgtttatcacactcatgttttaatcgacgttcacgtcagctattgcaattgatttatcagatacggcaagaaatgaataaaaaggttgacctgaatggacagttcttgatcattgacagctttccggtacctgtttgccaaccaattcgcaactatcgtgctaaaatttttcgcggttatgccaacattggttataaggccaccaagaaaatttacttctatggtttcaaagttcatgtcattgttagcgatgacggttacattcttgattatgtcgtaacaaaagcatcagttcatgatgccaaggagacagttgaactgatggaaaatacccatccatctaattactatcttcttggcgacgaaggctatttaggcaaagaactgcatcaacagctaaaacaaatgggttatgaactttggacaccatatcgtaaaaatatgacaggagctaaaaagcacaatgatcatcaattgatggctattcgcagaacaattgaaagcgacttttcgcttctgacctattacaatgccgagaacaatcgagcacgtagtctgataggctttcaaagccggttggaaatagccattttagcttataatatggcatattgcctagaacgatttaactagcaccacgcgtatcctattataatgatatatcattcaaaattccgaagctaattaaagcatcgcgtcttgattagcttcggaatggttggtaggtaatcatattagccttgatgtttattaatgccaagaacagctaagcaactggttaacaggcttacaataatccaggcaacggttgttaagctattgtcattaccagtttgtggtagttggttatccttatacttaaccgtttggtcatgggcttcctttgtcccgtcaggcttgataacagtaatcttccgcgtgatggtcttattcaaatcagtcgtgttaacaccctttggatagttcttgccaggattgtccggaagcttatcgcttggtgtctttggatcagttgttgttgttgtctctggcgttttgggatcagttggatctgtgtcctttgttaagctattgtcattaccagtttgtggtagttggttatccttatacttaaccgtttggtcatgggcttcctttgtcccgtcaggcttgataacagtaatcttccgcgtgatggtcttattcaaatcagtcgtgttaacaccctttggatagttcttgccaggattgtccggaagcttatcgcttggtgtctttggatcagttgttgttgttgtctctggcgttttgggatcagttggatctgtgtccttagtgtaaacaaaagttgtgatgtactggtatacagtatactggccactcgtcgctccaagagtacgaacaagacgataacctttaattttcttaggttggacttgccatggaccctttgcataccagcctttttgcggattaaccccattatttttttggttaggattatctaggttgaacgcaagcgtatcattattcctaagcacatttccttgctcatcaatgtacctcacagttactggtttgtttggtagcaagtaaacatgtatacctttagcgtaccaattgaaataatcagaattaagatatgtccctgtacttcctatataggagtaaccttgtttttcgcaatggctaatctcctcactcatttttttctcataattaccattgtttaggtcaatcctttcgccatagctaccagcaatcgtaaagagtttgtacggtagatttgtttcttctggaacaagtaacaattcagtcctattactatcagaattatttttcataaccttcttatacttgaaagttaaataaacatagttaggatcagctaacgaatttcgagtttgaccagtgattttaccctttaaaacaggttcagaaactaatttatatccaggaatattaatggctgcggcttcatagcgtgatgcatccggtgctttcttatcaccagcacggtgttgtggagattcaggggccatccagaaactatctagaacgattgatgctaaaatatgcccgttatctacatcaacatactctattttgattggtgacaatgatgcgtaatctaaattaatgttaatgtcttgcgtagtaatacctttcttaaggtaggtattaccttgtttatcaaaatagaaatacttattcaaaacttctgaattcattaatttataaccggccacagtaaattcttgatccatactatcccctggtcgaattgcggtctgcttgaaaggttgtttgaatacataatgaccattactaatcacttgaattggcttatgtagggtgacatcgcgaaaattaatagtaatgttgtacttactgggcagtggttgttttgctgtgtttgttgtacttactgggcagtggttgttttgctgtgttttatggattatcggcatttgttgcgctggcgttgttgttttatttggaactaatgttgatgaagtttgatgaacaaccgtatttgattcgtcgctaatccgaatattgcttgaatgggcactaacttgtggatcagtcacttgagtcgtgaatgtattttgagcagcaactgtcgtatctgccttggcattatcactaataatgaaggttaagccaacaaggacagatgccgttccaactgttaatttcttaatggcaaatcgttgtcgttttgccacttgttgcttatgtaatttgtccaaattttataccctctttctaagacacaatttattatactatacgcgtggtgctagttaaatcgttttagttaataaaaaagtccaatcggactagactcgacttgtaaatagtaataatagaaaagagtctgatctaattgaactgccttaagcttaagcgttttagccaccatttacaagttagttttaaagatttagtgataatttgtcggcactggtatcgtttgtatgcaccggctgagtttactcatcggcgaaatattgatcaaattaaaactacggacagtctgattttggctttacttatctggcaagctaagacaggaattgaatcacaaagaagattctgtgaatgtttcaattgtttatcacactcatgttttaatcgacgttcacgtcagctattgcaattgatttatcagatacggcaagaaatgaataaaaaggttgacctgaatggacagttcttgatcattgacagctttccggtacctgtttgccaaccaattcgcaactatcgtgctaaaatttttcgcggttatgccaacattggttataaggccaccaagaaaatttacttctatggtttcaaagttcatgtcattgttagcgatgacggttacattcttgattatgtcgtaacaaaagcatcagttcatgatgccaaggagacagttgaactgatggaaaatacccatccatctaattactatcttcttggcgacgaaggctatttaggcaaagaactgcatcaacagctaaaacaaatgggttatgaactttggacaccatatcgtaaaaatatgacaggagctaaaaagcacaatgatcatcaattgatggctattcgcagaacaattgaaagcgacttttcgcttctgacctattacaatgccgagaacaatcgagcacgtagtctgataggctttcaaagccggttggaaatagccattttagcttataatatggcatattgcctagaacgatttaactagcaccacgcgtatcctattataatgatatatcattcaaaattccgaagctaattaaagcatcgcgtcttgattagcttcggaatggttggtaggtaatcatattagccttgatgtttattaatgccaagaacagctaagcaactggttaacaggcttacaataatccaggcaacggttgttaagctattgtcattaccagtttgtggtagttggttatccttatacttaaccgtttggtcatgggcttcctttgtcccgtcaggcttgataacagtaatcttccgcgtgatggtcttattcaaatcagtcgtgttaacaccctttggatagttcttgccaggattgtccggaagcttatcgcttggtgtctttggatcagttgttgttgttgtctctggcgttttgggatcagttggatctgtgtcctttgttaagctattgtcattaccagtttgtggtagttggttatccttatacttaaccgtttggtcatgggcttcctttgtcccgtcaggcttgataacagtaatcttccgcgtgatggtcttattcaaatcagtcgtgttaacaccctttggatagttcttgccaggattgtccggaagcttatcgcttggtgtctttggatcagttgttgttgttgtctctggcgttttgggatcagttggatctgtgtccttagtgtaaacaaaagttgtgatgtactggtatacagtatactggccactcgtcgctccaagagtacgaacaagacgataacctttaattttcttaggttggacttgccatggaccctttgcataccagcctttttgcggattaaccccattatttttttggttaggattatctaggttgaacgcaagcgtatcattattcctaagcacatttccttgctcatcaatgtacctcacagttactggtttgtttggtagcaagtaaacatgtatacctttagcgtaccaattgaaataatcagaattaagatatgtccctgtacttcctatataggagtaaccttgtttttcgcaatggctaatctcctcactcatttttttctcataattaccattgtttaggtcaatcctttcgccatagctaccagcaatcgtaaagagtttgtacggtagatttgtttcttctggaacaagtaacaattcagtcctattactatcagaattatttttcataaccttcttatacttgaaagttaaataaacatagttaggatcagctaacgaatttcgagtttgaccagtgattttaccctttaaaacaggttcagaaactaatttatatccaggaatattaatggctgcggcttcatagcgtgatgcatccggtgctttcttatcaccagcacggtgttgtggagattcaggggccatccagaaactatctagaacgattgatgctaaaatatgcccgttatctacatcaacatactctattttgattggtgacaatgatgcgtaatctaaattaatgttaatgtcttgcgtagtaatacctttcttaaggtaggtattaccttgtttatcaaaatagaaatacttattcaaaacttctgaattcattaatttataaccggccacagtaaattcttgatccatactatcccctggtcgaattgcggtctgcttgaaaggttgtttgaatacataatgaccattactaatcacttgaattggcttatgtagggtgacatcgcgaaaattaatagtaatgttgtacttactgggcagtggttgttttgctgtgtttgttgtacttactgggcagtggttgttttgctgtgttttatggattatcggcatttgttgcgctggcgttgttgttttatttggaactaatgttgatgaagtttgatgaacaaccgtatttgattcgtcgctaatccgaatattgcttgaatgggcactaacttgtggatcagtcacttgagtcgtgaatgtattttgagcagcaactgtcgtatctgccttggcattatcactaataatgaaggttaagccaacaaggacagatgccgttccaactgttaatttcttaatggcaaatcgttgtcgttttgccacttgttgcttatgtaatttgtccaaattttataccctctttctaagacacaatttattatactatacgcgtggtgctagttaaatcgttttagttaataaaaaagtccaatcggactagactcgacttgtaaatagtaataatagaaaagagtctgatctaattgaactgccttaagcttaagcgttttagccaccatttacaagttagttttaaagatttagtgataatttgtcggcactggtatcgtttgtatgcaccggctgagtttactcatcggcgaaatattgatcaaattaaaactacggacagtctgattttggctttacttatctggcaagctaagacaggaattgaatcacaaagaagattctgtgaatgtttcaattgtttatcacactcatgttttaatcgacgttcacgtcagctattgcaattgatttatcagatacggcaagaaatgaataaaaaggttgacctgaatggacagttcttgatcattgacagctttccggtacctgtttgccaaccaattcgcaactatcgtgctaaaatttttcgcggttatgccaacattggttataaggccaccaagaaaatttacttctatggtttcaaagttcatgtcattgttagcgatgacggttacattcttgattatgtcgtaacaaaagcatcagttcatgatgccaaggagacagttgaactgatggaaaatacccatccatctaattactatcttcttggcgacgaaggctatttaggcaaagaactgcatcaacagctaaaacaaatgggttatgaactttggacaccatatcgtaaaaatatgacaggagctaaaaagcacaatgatcatcaattgatggctattcgcagaacaattgaaagcgacttttcgcttctgacctattacaatgccgagaacaatcgagcacgtagtctgataggctttcaaagccggttggaaatagccattttagcttataatatggcatattgcctagaacgatttaactagcaccacgcgtatcctattataatgatatatcattcaaaattccgaagctaattaaagcatcgcgtcttgattagcttcggaatggttggtaggtaatcatattagccttgatgtttattaatgccaagaacagctaagcaactggttaacaggcttacaataatccaggcaacggttgttaagctattgtcattaccagtttgtggtagttggttatccttatacttaaccgtttggtcatgggcttcctttgtcccgtcaggcttgataacagtaatcttccgcgtgatggtcttattcaaatcagtcgtgttaacaccctttggatagttcttgccaggattgtccggaagcttatcgcttggtgtctttggatcagttgttgttgttgtctctggcgttttgggatcagttggatctgtgtcctttgttaagctattgtcattaccagtttgtggtagttggttatccttatacttaaccgtttggtcatgggcttcctttgtcccgtcaggcttgataacagtaatcttccgcgtgatggtcttattcaaatcagtcgtgttaacaccctttggatagttcttgccaggattgtccggaagcttatcgcttggtgtctttggatcagttgttgttgttgtctctggcgttttgggatcagttggatctgtgtccttagtgtaaacaaaagttgtgatgtactggtatacagtatactggccactcgtcgctccaagagtacgaacaagacgataacctttaattttcttaggttggacttgccatggaccctttgcataccagcctttttgcggattaaccccattatttttttggttaggattatctaggttgaacgcaagcgtatcattattcctaagcacatttccttgctcatcaatgtacctcacagttactggtttgtttggtagcaagtaaacatgtatacctttagcgtaccaattgaaataatcagaattaagatatgtccctgtacttcctatataggagtaaccttgtttttcgcaatggctaatctcctcactcatttttttctcataattaccattgtttaggtcaatcctttcgccatagctaccagcaatcgtaaagagtttgtacggtagatttgtttcttctggaacaagtaacaattcagtcctattactatcagaattatttttcataaccttcttatacttgaaagttaaataaacatagttaggatcagctaacgaatttcgagtttgaccagtgattttaccctttaaaacaggttcagaaactaatttatatccaggaatattaatggctgcggcttcatagcgtgatgcatccggtgctttcttatcaccagcacggtgttgtggagattcaggggccatccagaaactatctagaacgattgatgctaaaatatgcccgttatctacatcaacatactctattttgattggtgacaatgatgcgtaatctaaattaatgttaatgtcttgcgtagtaatacctttcttaaggtaggtattaccttgtttatcaaaatagaaatacttattcaaaacttctgaattcattaatttataaccggccacagtaaattcttgatccatactatcccctggtcgaattgcggtctgcttgaaaggttgtttgaatacataatgaccattactaatcacttgaattggcttatgtagggtgacatcgcgaaaattaatagtaatgttgtacttactgggcagtggttgttttgctgtgtttgttgtacttactgggcagtggttgttttgctgtgttttatggattatcggcatttgttgcgctggcgttgttgttttatttggaactaatgttgatgaagtttgatgaacaaccgtatttgattcgtcgctaatccgaatattgcttgaatgggcactaacttgtggatcagtcacttgagtcgtgaatgtattttgagcagcaactgtcgtatctgccttggcattatcactaataatgaaggttaagccaacaaggacagatgccgttccaactgttaatttcttaatggcaaatcgttgtcgttttgccacttgttgcttatgtaatttgtccaaattttataccctctttctaagacacaatttattatactatacgcgtggtgctagttaaatcgttttagttaataaaaaagtccaatcggactagactcgacttgtaaatagtaataatagaaaagagtctgatctaattgaactgccttaagcttaagcgttttagccaccatttacaagttagttttaaagatttagtgataatttgtcggcactggtatcgtttgtatgcaccggctgagtttactcatcggcgaaatattgatcaaattaaaactacggacagtctgattttggctttacttatctggcaagctaagacaggaattgaatcacaaagaagattctgtgaatgtttcaattgtttatcacactcatgttttaatcgacgttcacgtcagctattgcaattgatttatcagatacggcaagaaatgaataaaaaggttgacctgaatggacagttcttgatcattgacagctttccggtacctgtttgccaaccaattcgcaactatcgtgctaaaatttttcgcggttatgccaacattggttataaggccaccaagaaaatttacttctatggtttcaaagttcatgtcattgttagcgatgacggttacattcttgattatgtcgtaacaaaagcatcagttcatgatgccaaggagacagttgaactgatggaaaatacccatccatctaattactatcttcttggcgacgaaggctatttaggcaaagaactgcatcaacagctaaaacaaatgggttatgaactttggacaccatatcgtaaaaatatgacaggagctaaaaagcacaatgatcatcaattgatggctattcgcagaacaattgaaagcgacttttcgcttctgacctattacaatgccgagaacaatcgagcacgtagtctgataggctttcaaagccggttggaaatagccattttagcttataatatggcatattgcctagaacgatttaactagcaccacgcgtatcctattataatgatatatcattcaaaattccgaagctaattaaagcatcgcgtcttgattagcttcggaatggttggtaggtaatcatattagccttgatgtttattaatgccaagaacagctaagcaactggttaacaggcttacaataatccaggcaacggttgttaagctattgtcattaccagtttgtggtagttggttatccttatacttaaccgtttggtcatgggcttcctttgtcccgtcaggcttgataacagtaatcttccgcgtgatggtcttattcaaatcagtcgtgttaacaccctttggatagttcttgccaggattgtccggaagcttatcgcttggtgtctttggatcagttgttgttgttgtctctggcgttttgggatcagttggatctgtgtcctttgttaagctattgtcattaccagtttgtggtagttggttatccttatacttaaccgtttggtcatgggcttcctttgtcccgtcaggcttgataacagtaatcttccgcgtgatggtcttattcaaatcagtcgtgttaacaccctttggatagttcttgccaggattgtccggaagcttatcgcttggtgtctttggatcagttgttgttgttgtctctggcgttttgggatcagttggatctgtgtccttagtgtaaacaaaagttgtgatgtactggtatacagtatactggccactcgtcgctccaagagtacgaacaagacgataacctttaattttcttaggttggacttgccatggaccctttgcataccagcctttttgcggattaaccccattatttttttggttaggattatctaggttgaacgcaagcgtatcattattcctaagcacatttccttgctcatcaatgtacctcacagttactggtttgtttggtagcaagtaaacatgtatacctttagcgtaccaattgaaataatcagaattaagatatgtccctgtacttcctatataggagtaaccttgtttttcgcaatggctaatctcctcactcatttttttctcataattaccattgtttaggtcaatcctttcgccatagctaccagcaatcgtaaagagtttgtacggtagatttgtttcttctggaacaagtaacaattcagtcctattactatcagaattatttttcataaccttcttatacttgaaagttaaataaacatagttaggatcagctaacgaatttcgagtttgaccagtgattttaccctttaaaacaggttcagaaactaatttatatccaggaatattaatggctgcggcttcatagcgtgatgcatccggtgctttcttatcaccagcacggtgttgtggagattcaggggccatccagaaactatctagaacgattgatgctaaaatatgcccgttatctacatcaacatactctattttgattggtgacaatgatgcgtaatctaaattaatgttaatgtcttgcgtagtaatacctttcttaaggtaggtattaccttgtttatcaaaatagaaatacttattcaaaacttctgaattcattaatttataaccggccacagtaaattcttgatccatactatcccctggtcgaattgcggtctgcttgaaaggttgtttgaatacataatgaccattactaatcacttgaattggcttatgtagggtgacatcgcgaaaattaatagtaatgttgtacttactgggcagtggttgttttgctgtgtttgttgtacttactgggcagtggttgttttgctgtgttttatggattatcggcatttgttgcgctggcgttgttgttttatttggaactaatgttgatgaagtttgatgaacaaccgtatttgattcgtcgctaatccgaatattgcttgaatgggcactaacttgtggatcagtcacttgagtcgtgaatgtattttgagcagcaactgtcgtatctgccttggcattatcactaataatgaaggttaagccaacaaggacagatgccgttccaactgttaatttcttaatggcaaatcgttgtcgttttgccacttgttgcttatgtaatttgtccaaattttataccctctttctaagacacaatttattatactatacgcgtggtgctagttaaatcgttttagttaataaaaaagtccaatcggactagactcgacttgtaaatagtaataatagaaaagagtctgatctaattgaactgccttaagcttaagcgttttagccaccatttacaagttagttttaaagatttagtgataatttgtcggcactggtatcgtttgtatgcaccggctgagtttactcatcggcgaaatattgatcaaattaaaactacggacagtctgattttggctttacttatctggcaagctaagacaggaattgaatcacaaagaagattctgtgaatgtttcaattgtttatcacactcatgttttaatcgacgttcacgtcagctattgcaattgatttatcagatacggcaagaaatgaataaaaaggttgacctgaatggacagttcttgatcattgacagctttccggtacctgtttgccaaccaattcgcaactatcgtgctaaaatttttcgcggttatgccaacattggttataaggccaccaagaaaatttacttctatggtttcaaagttcatgtcattgttagcgatgacggttacattcttgattatgtcgtaacaaaagcatcagttcatgatgccaaggagacagttgaactgatggaaaatacccatccatctaattactatcttcttggcgacgaaggctatttaggcaaagaactgcatcaacagctaaaacaaatgggttatgaactttggacaccatatcgtaaaaatatgacaggagctaaaaagcacaatgatcatcaattgatggctattcgcagaacaattgaaagcgacttttcgcttctgacctattacaatgccgagaacaatcgagcacgtagtctgataggctttcaaagccggttggaaatagccattttagcttataatatggcatattgcctagaacgatttaactagcaccacgcgtatcctattataatgatatatcattcaaaattccgaagctaattaaagcatcgcgtcttgattagcttcggaatggttggtaggtaatcatattagccttgatgtttattaatgccaagaacagctaagcaactggttaacaggcttacaataatccaggcaacggttgttaagctattgtcattaccagtttgtggtagttggttatccttatacttaaccgtttggtcatgggcttcctttgtcccgtcaggcttgataacagtaatcttccgcgtgatggtcttattcaaatcagtcgtgttaacaccctttggatagttcttgccaggattgtccggaagcttatcgcttggtgtctttggatcagttgttgttgttgtctctggcgttttgggatcagttggatctgtgtcctttgttaagctattgtcattaccagtttgtggtagttggttatccttatacttaaccgtttggtcatgggcttcctttgtcccgtcaggcttgataacagtaatcttccgcgtgatggtcttattcaaatcagtcgtgttaacaccctttggatagttcttgccaggattgtccggaagcttatcgcttggtgtctttggatcagttgttgttgtctctggcgttttgggatcagttggatctgtgtccttagtgtaaacaaaagttgtgatgtactggtatacagtatactggccactcgtcgctccaagagtacgaacaagacgataacctttaattttcttaggttggacttgccatggaccctttgcataccagcctttttgcggattaaccccattatttttttggttaggattatctaggttgaacgcaagcgtatcattattcctaagcacatttccttgctcatcaatgtacctcacagttactggtttgtttggtagcaagtaaacatgtatacctttagcgtaccaattgaaataatcagaattaagatatgtccctgtacttcctatataggagtaaccttgtttttcgcaatggctaatctcctcactcatttttttctcataattaccattgtttaggtcaatcctttcgccatagctaccagcaatcgtaaagagtttgtacggtagatttgtttcttctggaacaagtaacaattcagtcctattactatcagaattatttttcataaccttcttatacttgaaagttaaataaacatagttaggatcagctaacgaatttcgagtttgaccagtgattttaccctttaaaacaggttcagaaactaatttatatccaggaatattaatggctgcggcttcatagcgtgatgcatccggtgctttcttatcaccagcacggtgttgtggagattcaggggccatccagaaactatctagaacgattgatgctaaaatatgcccgttatctacatcaacatactctattttgattggtgacaatgatgcgtaatctaaattaatgttaatgtcttgcgtagtaatacctttcttaaggtaggtattaccttgtttatcaaaatagaaatacttattcaaaacttctgaattcattaatttataaccggccacagtaaattcttgatccatactatcccctggtcgaattgcggtctgcttgaaaggttgtttgaatacataatgaccattactaatcacttgaattggcttatgtagggtgacatcgcgaaaattaatagtaatgttgtacttactgggcagtggttgttttgctgtgtttgttgtacttactgggcagtggttgttttgctgtgttttatggattatcggcatttgttgcgctggcgttgttgttttatttggaactaatgttgatgaagtttgatgaacaaccgtatttgattcgtcgctaatccgaatattgcttgaatgggcactaacttgtggatcagtcacttgagtcgtgaatgtattttgagcagcaactgtcgtatctgccttggcattatcactaataatgaaggttaagccaacaaggacagatgccgttccaactgttaatttcttaatggcaaatcgttgtcgttttgccacttgttgcttatgtaatttgtccaaattttataccctctttctaagacacaatttattatactatacgcgtggtgctagttaaatcgttttagttaataaaaaagtccaatcggactagactcgacttgtaaatagtaataatagaaaagagtctgatctaattgaactgccttaagcttaagcgttttagccaccatttacaagttagttttaaagatttagtgataatttgtcggcactggtatcgtttgtatgcaccggctgagtttactcatcggcgaaatattgatcaaattaaaactacggacagtctgattttggctttacttatctggcaagctaagacaggaattgaatcacaaagaagattctgtgaatgtttcaattgtttatcacactcatgttttaatcgacgttcacgtcagctattgcaattgatttatcagatacggcaagaaatgaataaaaaggttgacctgaatggacagttcttgatcattgacagctttccggtacctgtttgccaaccaattcgcaactatcgtgctaaaatttttcgcggttatgccaacattggttataaggccaccaagaaaatttacttctatggtttcaaagttcatgtcattgttagcgatgacggttacattcttgattatgtcgtaacaaaagcatcagttcatgatgccaaggagacagttgaactgatggaaaatacccatccatctaattactatcttcttggcgacgaaggctatttaggcaaagaactgcatcaacagctaaaacaaatgggttatgaactttggacaccatatcgtaaaaatatgacaggagctaaaaagcacaatgatcatcaattgatggctattcgcagaacaattgaaagcgacttttcgcttctgacctattacaatgccgagaacaatcgagcacgtagtctgataggctttcaaagccggttggaaattgcaattttagcttataatttggcttattgtctagaaagatttaactagcaccacgcgtgtatttgtataaatgttaacattaattaatacatttacattagccagtattagtataaataagtttattagtataaaaagaaataataaagtatataagggtgactagtcttttgactaatcacccttttttatactttagcttatgcattagcacctatatttgcatttattaatattgctacatggagtattgtttatgttaatactactgtattggtaatatatattgaaaataccaagataaagcaattttcaaattattgtttatttcaaatagtaaaaactgttttcacgatttaaaagagaataattaacttcatcagtttttatatcaacaagacccgtcacatcaacgcaaccaagatatttatagttagaatatatttttgctaatatcacatttttataactatctacagaaactttactagttaaatctttagatttaaaaacttttttacatttttcaatattgttattcaatataggaagttgttctttataaagcgctgtatcttccactttagaataaaattgagcttgttcaaatatttcaatatcttgaattgaaatagatcgtactagaggagtttgagttaaataataagattttccaaatctagaataattacttgctttaacctcaataaatttttgacaattaataatatcacgttttactttatcataatcttcaatacatgcatattcttcatcaagtacacatttaataatagttccattaattaacatttctaatctcctactttgcatattgtatataaaagtcaaaaatatctttgtcactaataactttagtacatttatctataggagagaatcctactctagcgtttatccaaggttgttcttgttgaataatactctctagttgtacaccagaataattaccatattctttccaaacctgatttaaaatatcttctactttttgagaaaaaataggtctttcaggcttatcctgaatagcactaaagccataacttttatatttcttataaatcttcataatttttgggccatgaactccagcaataaatttatcgtcttcaaacaacttgttaattaaattatctgatgactcatttaataaggtcaaagtccaagcataagaataataaaccaatatctgtaattttttaactgaaatattacctttatctatcgctaaaaaataattagctacttcattagatgtgtattttttcttaaaaaatatttatatacccttataagaaaattgaacctagagctacaagattatttattgagtgggcaattatagagcattttaaatctttagttttaagataaatcaatgctagaatacttcctaatagccaatagactggaaaatagaaatcaagtcttgattcatgcataacactgaaaaataatccattcagcacaatttgaatataaccacttaactttaaattactgaaacagttgaagaagaactgtctaaaaatcaactcctcaaaaaacggagcaactacaccaactaaaagataaaagcttatatctttttgtgcaatttctaatagagcttgttgattattactggttgtttttagcaaaaaagccgccaaaagctgtatagtcagcattgatacaacaccaaccgttaaaataccaatgttcttcatcgatattttgcctttccaattaatttctagctctttctctttaaaactcttgttttcaaagtgcttaaaataatgtagttctagcacatatattactatagctaagatccatgtaataatatgagcccaaatactagcttgacctttaattgtcattagaaaaagtagttgtatgattgcatacccacaaaaagaagcaatatagaataaaatttgagcgaacatattttactccttaagcttaaattcagctgcagcttctggggttaagaatttaaagccataatatttaatagtttttccttcagaatttttgaaagactgttttgcaagctttccatgagcaacatattcaacctgatttttattaatattcttaaaagaaattactttaccagcaagcaacgctgcaacttctgaatccgtaaatctatggccactccatatacgtttaaatttgatatcttttccattaaattttccagtaacatagctttctggatcaacatctacttcaggcttaaatccccaaaaggcttttcctttatacttttgcttagctaaaataccttttacattgcctttatcagtatcaaaactaacactaccacctgctaataaagtttgaatttcattagtagtgaagatatgaccaccccacacacgcttaaaatggactacttctccatcaaacattcctgttgcgtaaattgcttcatcatatgttttatcttctactttaaagccccagaaaggcttacctttatattgctgctgatccaatttaccagaaacttcaccgccttttacagaaaatttgattgtttgtcctgcaagcaatgcttgtatttccgtatctgtaaatttatgatctccccacacacgtttaaaatgaattttttgtccattaaatgtaccagttacataagtttcctcatcatatattttttcttcagacttaaatccccagaataaagtatcattatattcttgtcgagcaagtcgaccagaaacctcaccactttttactggaatcttgattgcttgccctgcaagcaatgcttgaatttctgaatctgtaaatttgtgaccaccccactcacgcttaaatgcaacgtcttgtccattaaacttaccagttacgtattctacttctttcatgtttatcctcacattctttaatttagttatgtttctttgcattatttgtttatcagcaagtaccatgtcattgattaagtttggaatatcttgccaatttgcttgattcttttttaccaaattcatcaaatcgaacaatttcttactagtcttttcatctgcaattttacagtcaagcgacagaatagcttgcagttttccaagccccgtcaggcaataaactctctttttcaactgtatcagagcacgatctccttcagaaatatcagaaattgttgacagccgtgttgctgcagtaccaatgcctgttttatcaagataatttattaaaaacttatgtgttggtaatttaggcttgggattagctccttcaaaaataaatggtgatgcactatttgaaaatagtgtattttgttcttcatcatcatcgtcatttagagagctttcatcaaaaatggctttatatcctaacttttttggaacgttaatttcacttttaaaatcaggatttaaatttaagtgagcctttatttgatcatattcgtaatcttcacagagcatagctaagtaactctttgctaaagtttcataaatcaactgacctaaagcaccatatttagcacttatttctgttaaagaattaggcacatttaagccaggcctattagcaccatgatcagctttagttattatgaacttttttctagacaatttatgagttaaaagactctttgaaacacctacaacatcagcaattttcggagctaaaggcagtaattcatcaaaatttccttgagtaatcttagtatctgcagttcttggataagaaacaattcctgcctcatacattctttgataagtagtaagaatttgtttaggtgtatatccttttttagcaagcaatactgataatctacctaaatccagtaaagctggtggctgcttagattttcctttagtttcgtcaattattactacattgttttgaacataatttattaagtctttttctgcacctgttctcgaattaaatctaaacatatcagttgcttcatcaaaacttcttttaaagatattaccattactatctttaaacctgacttcataaaacggcttttttacatactcatttatagccttagtttgtaaataaattttgttcaaaataacggactttaatcggcctaatcgtagagtagctggtgaatgatgagcttgtcttgcaaaatataaggccattcttgaatactgcattgaagcgtaatcgaagcgttgtcttgctaatcctgctaagtaaattggctgtttgaattgctctgtagcatcttcccaattatttaaactctttatgattccttttggtgtttcatcagcaaaacggattctatagactttgcctttccaatccaatgcattaacaatttcccaacctaatacatcaccttctccagaaggatcgttatcagttgcaattacaattgcatctttgtcaaaagacgcctgttctatatagttaaaagttgctctatcattatctgttttaaaaacgtttttccaagaaaaatcatttaagttccaaggaagatagttaatattagaccaatcagcatattttggttttagacttgcactaacttgattagctggctcatctagagtgagcaagtgcccgtgagaagcaacaatttgaaaatagttaccattaaaaaatccagttgtaccacctaatgctttctcaaactttcttttcacatcgggcttttcgcataaaatcaataatttcacattatccctcctttgttataattttactcttaaatataggagtttatcaaacaaaaaaaacaggcttaacgcctgctttataatttattctttataaaaattcttataagttaaatcaattatcttttcaatatatgcagattgtgaatagccactatcttctgctaatttacctaatttctttttcgtactagggtacaaagtaaatgcatacgtatttttagtttctttctgcttctgcttaatcataggcttgggaaagataacttccatttgcttattttctttttcttgattatcagttgagcctgttaaagcttcttttatttttttgccgtcttcaggattaaaagccataataatatcacctattctttacttatttactaattctttcagctatttgcttgaaaatagcttcaatttcatctttaaattttctctgatgcgtcaatacgtcaggattatcaagtaatttaaaaatatcttgatggtcaagagtcgaacgattgaacaactcacgttctggaattgttgcaattatactttcatcagtttcagtttttctagttagttctctagagcttctagtattaggtctaattctatttagtagaaatagaacttctgcagtaacatatgtttttcgtgttgcaaaatcaattgcttcttttctaagttcttcaattctactttcaaggttgaacttagctagatatccatgttctgaaggtgtaatcggactcaaaacaacatcagaaattatgatagcattttttgtagcggttgagaaatcaggatgacaatctatcagtaaataatcaaactgatcaagatttaacttattatagttgtcagctagccacaaatacaaaagcatatttttagaggtttgattttccaaacttctttcaatatcatctagatgtaaatttccagcaattaatgaaatgttaggagctacatcatgaattttcacttcaccagatctagtgaaaatattaccaacattagtatcagtatctatgacatgataaatttcacttaaattacattgatgatctaaatctaacaataaaactttattacctgttcttgccagaaaactaccaaaattataagttaaagtagttttgccaacgccacctttgattgcttcaaatgtaatgattttcattataaattcctctcttgttttaaaagagcaaaaaatgttataatgcttacgcattatacatttctgctatttgttttatgcaagatacatttctactagttatttatatttctgctagttatttgtatttctacttgttatgcatagccgttatctatgcatgatatttaagaagtgtatgatgcttataatgttcttctctataatagagatgccttataatatatttattctttacatgcaggagttttctcctgcttttttttactcaaaaaccatagttaactctcttgcccctcataaatattgctccctatgtaataattataacacttatatatattgatgcaatagttataacattaataagtgtatttgttataatgaacattattattcatagcattttagttagaagggggcttttttatgctaaatattttaaaagaatcactaaatatcattattcacaatactcttactctatttaaacctagacacttaaaaagtgaaaagaaatttgcgcatgacttttctaaagatagtagatctattgcttcagattttaaaaaaacaggaaaagatatgcagaacgcaatggttaattttaaagaactagaatatttagaaaatactggaactttgaagactgtttttcaaagaatgaaaaagtcaaaagattcagacttcgaagacctataagccttaaatataggcttcattataggaaaatcggctaaactaaataataaagagctaatttattgtacctaatgctaggacaaataagttagctctttttcttatccttttgttatgttctaatcgcttattttcaaaagtgtaaaaaacacaataaaaataaacgtatatacaattaatccaaataacatctatctatacctctttatatatttatctttacatattaataataacatatataaatataaatgcaagtataaatgttagttgcatagtgcaataaaaaagagtagtagcatttgctctactcttatatataatttacctgtctaaatctttccctgtagtgagtcactacagtcttcatttattgtatctatccacttatccaaatcattcaagttaccaattatttcagtttgacctgtttcagcttcatttttagcttttagagcttctgaactatcaaaaaaatctataaatttaatttcatcattgctcgctttaatcaaattcaatctaaatctctcaatcttttatatttcatatatcttgctttttttatggcttcaaatgcgttaatttcggttttatgattttcaacagttattaattgggctaatttatcaatatctgcgctatgttctgcttcaattaattctttatcgtgacgtgaataatctaaaaattgaccgtgattagctgctagagcttgtagaaataatcttgtactacggccattgccttctctaaaaggatgcatataattaatggaatctaataattctgcataatctttacttgttggtttagcaatcttttttactctgcttaattgcttatcaatatttattgtagcaaaatcgaatctttcatgttccataaattcagtattgcctttatacatatttccttttctatatttacctgcccaatcatataaatcagaaaacagaaatttatggataattgataagtcatataatctccctattttaggttgttgatcaagaaatatataggacttttgagcagtaatattcatttctagattttgaagttcctttgcatctgtaatgtgaagtttattctttaaagtaccattagaatatagtgtttcttgtatccagtcagtcattattttttaccaaataattcttgatattcttttaaatacttaggattaggattatatgcatgctcaaccaaattttcaatgtccaatttagtaggctcccaaccttccatatggttatttaaaactgtaaatctaattaacttaaacatccttttatctggaatataaacgccttgaatagtttgggcttcatcattgatttttaatttatatggtgtttttactagcatttcaaatagttgtgaacccttcatttctaacccttctgcaaaagcaattagtgtttttacagtccaagtttctacaggtctttttgttgcacttattaatgtgcttttagggacattaccatttctagcaatttgactaatagaaatatttttattcttaattaacttagtaattgttgtttccataattatccttctttctatctttattctatcattatatcgttctttttgcacgatatatagttaaatgaagtaaaaaaagagtaggtgtataattacacctactcttttacttttataacgcatcctttatacagcgatgcttcttctgacttttaaaatgcaccctttatacagcgatgcttcttctgacttttaaaatgcaccctttatatagcgatgctttctctaacttttacactacaagtataacatttttcacaatcattgtacaaattatcactcaaactgtcgacctatatttttgtatttataatattttacttgtttgacatatttatttgaaacataattcaacttattaaagtcattacatagtttttttactttatttggtaataagttatgagtatagagatgaagaagttttttagctttttttcgaatagttttattgttattgttagcattaatacttctttgttgagtcattaataaattaaagtattgcttatcattaaatttaatattacctacttttttaactattgggttaggtgctggaatcatgttattaagattaataactgcaatcaatttatccttttcttcaattttacaaaaagttaaactttctcgcatatattcatgcttttttttaggagaagatagcggtgcgaaatattgttgagaattaaaagttaacagtacacctacaaaaggtctattgtgttttccatgattatagaatacctttggttctacctcatttaatcgtttaatataggaattatctatttcatataaaaataatttttcatttttagacattatttttcaacctcaataattaaaatctgtattattataagcctataagttcaatttatctattaataagcataaaaatagggcacagatgcgatcgcacctgcacccttttattttatgaagctaaattacaataaattattgttaattcttgtttcaatctcatctgctaactcgtcaaagctaccttcaaaataatctttaatttctgcagtagtacaaccatcagtggtaccgcaatcataatattcaaagttttcagacctattaaaaaaagtatttggaataaaaacttcatctaaaccccaaattgcctttctttgttcttctgtactcaatttagtaaaatcttcaactttactatcatcaagaggtttcgcattccaatatgcaatttcttcagtatttgtaatttttttgccactttcatcgttatagctataagttactgaaatttcagtatcatttgaaaaaaatatcttatttactttgaaattatccattgatttcataatgttctccttgatattaatatatttatctttacattaatattataacatacgcatttattaatacaataattaatatatatgtaattattccaaattaaggcctctaaagcgtttaatttttgcttgtttcaatcttttaatttttttctgcttctctaatgtagcctttttaaattcttcaaatgaactataaaattcatctgcactatagtcaccattgtcatgatccgcaattttaacaatgtgttttttataatcacacataaaaaagttaaatttagaatctttctgatgctttcttctaatttcttgcaactctctagcttctttttcaacgctcttaggtacttgtgtcaagtaggaactaggttcatgaagttctccttcaaaagatttataccatctggaatgagaagttttctctttaatagtaacaaattctactgtatctgaagtaaagtcagcattatttataatttcacttaattgatttgctcttttttggtctttttcgcagtctttttcaatttctaattgagtttttaatgctttttcagcagctcgattaacaatttcatatttagaagcacaagtctttgaaactttgccattatttttaaaagcatcgaatttgtggtgtcttgtatctatatcaaaacattcatcactttgtttattattaggattatataagtccataaaagttaaggctacttctccagttgattgtctaatatggtattcaatttcaatatttctttttatcattttaattctccaaaaaaagacactagaaagtctttctagtgtctgctatcatctatcgttcaaaacctctgctcatagctaatttctttgctctgagatttgcttttgattcaaacttctttctcatattttctctaatgcttgcattctgccatgattctctcaaattctgtattgcagatgtttttagctttaattgcttgtcataaactttttcttgagcaatttcttttttcatttgatcaatattctttttcgtatcagctaatccaaactctttaagcaagcttttagcttctcttgttgctatatctttattttctttttttctttttgaagtttttatatattgcgtttttgcttcttcttcaaaagttgttaaatcttctaccacatcatctaaattcttactttcattcacaccagccaacttatttgcttgcttaaagtcttccaaaaagggatttaggtaataaccatttttagataaataaactttagctagtttttcagagcaatttgcatcacgtcctaatttaagctgattataaatttcactagtatgatctaaagtttgcataaattctgaaagactttgcgcaactatccttggtggagtatttatttcaggactgtatctataaatctcttgcctttgggtccattgttttccttttacaatttttgttggtttaattactaataccatagttacaaactcctttataaagaaaaaaagagtcctaagactcttaatataaatacatttacaataatttatgtataaacatgtattttttgatttaaaaagcttatctttccaatcctgctttctgtattctttttagtttccttgttttttcaagctttttttcttctaaatcaatatctttatcaattgcattaattaaattgacagctgctttagttggcccattaaataaagctagtttttctttatcggctagctcatcaactttcttgccattttcagtccaatcagcaatatactttaaagtttcatctttggtatcaattccataatgtttagtaactaaataacttgtcatttcagcttgcagttcctttaaccctctactaaagtcatttttatcagcaactttatgaagttccgcatggcctaattcgtgtgcaagcactgcaactttttctgttggagtattatccgcatttaaaactattgagttaagttcttcagaaaaatagccttttgcattatccattggtggcaaatctttacatttaggatctgttggattataggtcattaattttagatttttatctgcaacttgtttcttaatagctttctcaattaacggtagttgcttaggtttttctacactaaaatcttgatgtcgattaggatatagcttcggatattcttctttaggcatagtggtttgtaaaacatcaaatacggttcctacaccaaaagcttcctttacagaagttttaatctttccatttttaattagttctttttcttctggcgttgcttgcttaagatttacaggaatgatttttccatcagaagtctttctatcaaacaatgttacaggtttaggtacaataatttttatccccttttggccacgttttactgagtagcctagttctttaaattttataaatgatccaactgccaaggcgccagaacgttgactacggattaacatcacgttatttgcggaataatcatgaaatttactgaagaaatcaaagaactcaagcaaatcttcagggctttcagtatatttatgtacttctttcatcaagtcagctgtcaatttttgcatggcttcttctttttgctttttccatttttcagaatcatacttttttaccatttttctttcctcctaatgtatttattgatgctaatacaaacacaaatacatatatatttgttattatctagaaagctctctttgcttaagttgctttagcttcatcagttttgattttctagctaaatctgttttttctttattaggagtatctaagctaagatttctttcactaactgaagaaatttgaatatcttttggattaaaaacaatgtattctttagttttatcgccattttcaagctgaaaatctttcactgcatagtgaatgtgcattttctttaaaataggacttaagcattcagaagcactcgctctaccaccaacctgattaccaagatcgttgataatatcgatatcactttcatttgtagttacgatgttttcagaaatgctttgagcaatcatatgatttccttcatcaatttctgtttcactacttggttcttcccaatctgataaaacatatggataaccgtcctcatcaatttgcttttgagcaactgcttctatcattttggttacttcgctttgatttaaagtaactttattcgttgaaacttctcgattctctggatcttctgttaaatggacttgatacatatatttaccataaatttttgctcgttctggactatcagttaaataaacgccaaatcctaatgcagtaccatttttactttctcgaatttcaaacttgtcaaatttttcgtttgatccgtgatataacatattttttctccttaaaacaaaaaaaggcacaccacttatgacttgtgatgtgctttactacatagatagatattcaaaatattatttttacttactaaggcgctctaattgttttcatttacttttctccataaaaaaatcactagcgttttaactagtgactataatttgtaattattaggtgagtattttgaggtgaactaactctacttgattgcataaaggaataacgcttttgatattcttctttgatatatccgtgatacagttcagtaattagtttatctttgcttattatcattaatgctttacaacttaaatttttaaaatcttcagccaattttctttgattatcttcagtaaaataatctttggtagtgtaatcattaaagatagtaccgtatggtggatctaaaaacatgaagtctacagttttagctttattaaaagaatctatataatcagaatttgttatagttgctgtttttaaaagattatagtgttcttgatcaatagactttgtcgtcaatgtttttctataaccaaaaggtgaattcatattgccttttgaattagtacgaaaacgacattgccaacttaatttattaagaatgtagtatttggtggcaaaagttagagtttcatcattgcaattaaacttatttctaacatcgtaatatagctttttttgctccatttgactcatgcttttatactttttagacaactcatctatttcattcttactgcgatcatattctttaataaaatcagtatagaaatgaattaactggttatttttatcatttaaaaaagcttttacaggttgtaagtagaagtagactgctccacccccccaaaatggctcataatattgttcaaaattttgaaggaaatatttttgaaaataattaatttccttatactttcctcctacataagttaaaattggttgcattgtttctcctttgttttctccataaaaaaatcactagcgtttaaactagtgattatctttccattccacgttgtcttaatttggcaatttttctcttcttaatttgttgtttttcaagtaaatttgattgttcttttgtatacatccctactgcaatcaacattttggtgctattttcaattgaaccaagagccttagtgtttaaagaaatgggttccatgtgaatagtatttttatcttggctttctttaaaaattgctaatacagtattttctgggatattgtcgtattgcttagcttctttaatattcaacagtgacttaggttcaaatatttctggctgaaaatcatataatgctaaaagtaaatcattctcttttgttttgattgctcgattaacgccaattctttgagcctgtttaacttctcttaagtcagctaagactttagaatcggcttgcaaaactttaggtagagaatctaagacctccagttttgaaaatgttgccttttcaatataaagtggctttgtattttctcctttttttagcatttcaagtttttgtttaaaaccacagtcactaaaatcaatcccagttaaatgcggaaatcgttcttttttatatttaacaggcattagttttatattcttaccatctttataaatataatcaatgctcccctcactaaaattcttttcatagaattttgaaattttggaaatgacttcttgatacttatttatttcttctatttcttttttagaagctaatgttttaaatttgtaattagtatttgttgaatcaatatacatgaacattgttaatcaaactcctttttgttataataaagttattaaaagagagcatacttacacataataagggctgatttatcagtcaggttccaactgccttcacgttttgctagtgtaaacatggaaagaacaccccgtatgtacttcaacattgttgaggtgacgatacataagcaatatcgcttctcggtcgtgggtaaggccaaaagaaaaaagcatcacttacgtggtgcttttttcttttgccttttaaattaattagaaaccatttttaattgctatcaatttcttattcgttataatatcaatctatatcttaacattgacatcaatatatataattgtaaaatattaaagttctcttccaagcttttgagcacaaactattttttagctttagcaaacctagcttttgctcttttaactctcttagtattgataacttcatctttagcatttttaaacattctgtaagtgttacatttatcgttaatttcaagctgatctaatccagtaatttttatattagaatcttcaaacatcccttttgctgattgcaaatttttagtaggcaacttaaatcttgggtattgttagcatgagcaaacatataatcagctacttttagacttgatccaatattattaataaactgttgcattggataatcatcttgagaatcttgataaacttcccaatcatatgggcaatctgcaaacgtatatgtagcatcttctaatttgggcattttaaatttatctatattttcgatgcgtacatcactaactgtaaacatacttgaagaatttcttaaattaggagctcctgcttctggtaatgtaactattgctcctgaaatattaaattgaaacatttttttagtatctagtacgtgactaaaatcccaattagataaatcaatattttctaaggagtaacaatcacaaaacatttcagccatattttctacttttgatgtatttagattttctaagcctttaatttcttttaaactttggtcggacataaacattgcttccattgattttacgtttgaagtatcccaaccttctatattcaatttttctaaatgatataatccataaaagaaattagataaatcggtaaaattagaagtatccagtcctcttaaatcaagctctttaactttgcaggaatgatcataaaatctgtatgtgcccaatgcattttcgttgctatcggtgctatcacatatgcgcactacctttttattatttttatttgaaataataactttttcatattcattcactaaaatatgtaaatcatgttgtttaatacgaactggtcctttatagccaaatggtactaaatctgcttcattaggaatatatagggtttggttctctttgtctttataatcaactaagactggattattatctttatctttctgaatttcccacttattaaattcttttctatcaaaaacaaattctttagtcataattttcccctcatctttacatttgcgttaacatatataaatgtattaattataatattaaagttctcttccaagcttttgagcacgagccatttttttagctttagcaaatctattctgtgctcttttaactctcttagtattaacttcttcatcttttgttccgtaaaacatagcatcagtattacatttatcattaattctaagtttatctaatcctgtaattttaaactttgcattcatgaacatgttatgagcatggtctactgttgacatatcaagttttgaaatatctagactatgtttatcattaacattccaaatatctccaaacatataagaagtattttttaaatcattacctatattgttaatagcttgttgcattgcattatctttctgtgcaacttgccagttatatggacagcctacaaacatttctctagtattttgaaccttaggcatcttgaacttatccatattttcaataattaaatcactatctgcaaacattcctttagcacctataaggttaggagcacctgttttcggtaaggaaatagtaccagttgagtttttaaacatttcttcagtatctagcacgtgactaaaatcccaattagataaatcaagctttttaaatttcatatttttgaaagcttcctgagttcctctaagtgatttagtattccaattagagatatccaaatttttaatacctgaatttagaaaaatggaatccatatgcttcacatttgacgtatctaaattttccaaaccttttacttcttttaagtttggtgtatgggcaaatgttgattgcatcaaagttacattagaagtatcaatgccttccatatttatactttcaagttctttttgcccataaaataggtgatttaaattagttaacttagaagtatctaatccacgtaagtcaattttcttaagagttgccttaccctcataagactcttgagaaaataagccataggtataatgctttccgtctggactaaacaaaccaacctttttattgtctttatttgaaataatgacagtttctttgttgtcacattgccaatttaagttattaattgggatttttactttacccgttactccaaatggcgctaaatctgcttcgtttggtacatatagtgttttattttgtgtatctttgtaagaaaccaaaattggattattattttcatctttttgaattttccacttatcaaattcctttttatcaaaaacaaattctttagtcataatgttctccttgttacaataattgcttaccaatttcttcaacaactttagtagttactgcattaccagcctgtttatatagttgtctatcacttaaacctgcatttttagctttataaaattgatcatctgtaaatccttggagtcgccaacattcaagaggtgttaattttctaatagccaagtcagaacatctttttactaaaatattgggttgccgatttccaccttgcattgtgtttagtgttggtgcaattcctgttggatcataaactctaccaacttgcggattgccattaaatgaaccagttctacagtaattaccaatttgttttattcttgatttaacaaagcttttactttgtctttggataggaaatatttggctggtacattcttttctaagacgtccgataatataaattctttctcggttttgaggcacgacttctgaagattgcaaaattgtccattctgaatcatagccgactttgtccaatgcaaactgcacccttgcaaatgcccatccatcatcaattgataacaagtttttaacattttcaatgaggagatatttaggtaacgtttgttggttttcaattctttcttgtaaaagtctgataacctcaaagaacaaacttgatcttttccctttaaatcccttttttcttcctgcaatactaatatcttggcaaggaaatccaaagcaccaaattcctgcatctggtaattcacttccttttgttgttctaatatcatttttagtaaattcatctttagtatcatagatagcttgataactttttcttgcaaacttatcaaattctatgaatccaacgcatttatgaccagcagcttctaagccagttctaaatccacctacgcctgaaaaaaggtctaaaaacttcatcgttctagaccttgctttcttcttaaatttttaattctatcttgtcgttctgcttcaacttctttgcgatacatttcttgtaaaatatatcttccttttttcttttttgctggtaaaaattcttgtttattaaaatcaagaggaactgaatcgaattttagttgattaatttcattgatttgttgagaaatagttgaattttctgggtcatatatatcaggatacgcaaaatcaattgaggcaattaccttttttgtcttgttattatagagagtaattttatttactctatcattaatgaaatcattgtagtaattcaaagcatcttctgatttagcttcaaattctttttcattttttaaatcagttattttacattttatatatccatcgtcaagccaattgtcatcagctttatttaatgcataatcatacgagccagtttctgtttctctaaaataaattggagcaaaaaaagaatctgaataacttgtcgtatccagatctttaggtgatttataagtgttaagtgctgtactaacaacacttagtggttttattttgttatgaaagtcttcttcaacttcttgtccataattaggaactatttgaatatgataaatttcattttttgatacaaaatcttgtgtcattttatactctccttttgatttttttattgaactaaaaagaaattatcctttattcttttgagtaatttcaattcactatcaattgctattactaattcttctgatgtactatctttgtctaaaaagatacttaccaaattatcatgttttgctaaatattcttgaatgatttttctgtttggtaacttttggaacaacttttcgtagtgagaatgaaccttaatataaattgcatttaaaaattcttctttagttttaccattcaatgattcttgaaaatctttatcaaataattcaggaaaattatctttccaaaaactaataacatagtctttagatttatagctgtcattttcagaatcataaaatgaatcagctgtatttttgttgccacttaaagataaaatccttgaaatatccattcttaattttgatagtgtaacatgattatcataataagctgacaacaatagaaaaatttgagctttttcaatattttcttttcgtaagccttgacctcttataaaggcgatatccttacaaaaaatatgtgccagtgcattccatacatcttcatttgggactctagtaccagcttcatatcttgctacagttgcacgattagctgatataccctctttttttaataagatggataactgctgttgcgtaaaatgattagcttttctcaattctttaattctatttggactcatctgaattctcttttcataatatgcaagatataaaagacttaatattaaatttgttgcacatccagataaataaaaatctgaaacacccagtgctctagataatttatgaatggttttaggagatggaaaattgactccactttcatattttgcaattgttcctctagatatttttactcccttttccgtagctaaataagaagaaaattccgcttgggtcatcttcatattttgtctaatatctttaattatcggtaaaatcattttttaatctagcaaacttctttcttgaatatctaattttctttttgcatctaaatatttgttttttaattttttctttctagtttctatttcttggattttttcttccttactcttatgtgtttctaaaacttcatctgttatactatcgatcaacattttatataccttcctttttcttatatttatcaattgttcttatattgaatcggtggtgaacgaatcattttattcaccatcacttgttatcttgaaagactttgttgcctagctaacatcttttttttagctactaatcgttgatgctttagagtatcgttccaatcttttccaaatgtaggtttcaagtaatgtacttttgaaaaacgcttggtaatatctttgacaaatttttgtcctgcttcatcattatcaacgcctaacgatactgaatttaatttcttaccttgtttagatagttgattacttagctgaataacataatgttcaaaagttttttctttaagtccttcgagagaaactaatcgaacactctttgcaccattaagatgcgtgttatagaaagacaaagcatcaattgtactttcaaagaacacaatattttcaggaatttctccagaattgattcttccttgtgagtcaacgtcaaagttaaaccctctttgcggagttgaattcttttcaatgagcttcaaggttccacgtttaccaaatttcgcatgattaattgttgttccttgttttgtaagaccttcaatttgtcttctattttctggatttttccataaaaaaagtgcatcgccaaatcggttctcacaaatcaaaccttgacgatgcaactcttgcattatattaggatttaaacctcttgttttagttaagtaatttaaagctttagaaaagttgggacttacttgttttttatcaaactcaaacggctttttttcaggcgctcgatattcttttggtaagagctttgttttagaaattagttcaatggcttttccaaactttactttatcagaaatattctcactatctaattgatatttagtcacaaaacttaagcaacctttgccacctgtgtcacgagaattccaaaaccatgcgttttttgatggagtaattacaagactgtcatgatcaactcctctaaaagtggtagctgaatcttgttttaaatcaattccacttgcacgagcgtagtcaataatattgacatcatttaatgctgctaattcttcttcacttaatctttccataaaaaatcactccttatcgtactcagataacaaatttattgcttctctattttcttgaataagttgtttaaaaattgattcatcattttttgtatccataaaaatcacctccttttttagtgctgagaagagcttttatttgcagagtttgatatttaagatagttaactaccttttaattacaaaatacgctcaatttaaaagcctaaattttcagaagaacgagcttctttggcttgcattttttcatactcacgtaaagcttcttttttagttttagaagtaaaacttttagctagggctaactcacgtttactctgaatcgctagtcgttttcttaactttccaatacttgcatgagtatacaaaggctggcttaaattgagcgattttaattttttctttttagatgattttatctttttgatataagcaactttcggatgcgtttgcttatatttaacttgtctatccaattctcttaacacactttggatatagttttctgttggtacagtatcttttaaatacgcacctgcgaaaagtttcttcctatatttattagcatttttatccaaacctgctaaaacatgtaagactgcattaccatttcttcttttcatatcttcaattttattttgagcataatctttattgtcacgcttgcttttaccataaagttcttctcgatttttctgataataaattacaagttcttgatattctttccaatcctgattatttttaagcaattcattagtaaagtgatcaagtttctttttagttttcttatcaaacttttccaaaaaggcatagttccaactttgtcgattacttggcaacattgccataatttcattgagttgcttttgtaattgcttatcattgagattttctcgaaaagatgttttaacaccttgtctaactgcatctctgtgaattgaaatttgtttggtcaactcactggtatcaaacaaggtattggcaaatttagacttcatgtgatcaattgttttttgagttcgctttcctcgtggttgagaaacgacttcatcaaacttatttgttctttctattattggtcgatgattttcttcctcaataattgcgatgtggatatgaacattatcagtattccgatgaatggacgctgtccaatatggtcgatacaaaggtggatccatttcattttccatcacttccatcattgaagccgttgctttccttaaaagagtttcatctaactttccagtttcttgattcaaaattttgtgcttcactaaaaaatcattgtcaaagctcacaacgtcttgccacataacgcttccatgcttctgtgctgaattaagtttgtcgcggatatgttgtaaatctcctaaatgaacttgatccatatctgatgtataaacacccagaagcaacttatctttagtcggatgaaattctcccaattcttgtgcagccttagtcacacgttgcaattcttgttcttcttttgaagtacgatgttcaactttggccagcgcaccaattcgagccatataccctaaatacttttcaaaatcttggtctgcgagttcagaccaagattttgcgtgcagaattttttccgcatctttttgaagtggatcttcactatcttgatttgaagaataatatgtttttgtctgtaaagtcttaatttcaacttttcgtatctcataattaagagccttcaattccttcttctgttcatcagttaaataatcttgtttttcaagagcttcttttcgagccatgtaacctaaatattttgaaaacttaccttgagatggaattgaaaattttgacgttaaaattattgatggacgtttcattcataactacctacttttatgactaaatttattttgacgaccatttgcaaccctttctttcacttttttctttgcttcatcaactaaaagataatcactacctaactttaaagataaaattggttccttgttaacatcacgaatacttcttgcatacatttctccaagcaattctaaattcacttcttctgtaaatttaagttggttgattgctttttttaattcattaattggtgcttgattattgaaatgattatttaacaagtatgaaataactttttgtgctgtgatacttctatctggaaaattattttttaactgttcctctacttttttccacctatctgcatctacatttgaaagtgttgcttgaatatgtttaatatttctcctcatttaattcttccctcgttctctctttgaaatttcatcaagtaaatcattggctacatcatcatcaccaacaaataataatttgaaaattgcatttaaagcgaagttattatctttgagtaaattgctcatcatcttaagctgaactgctacatcactatcaacttttttataaattttttcttctggtatcttttcaatttgtgcttttaaaaaatcatttcttgaaattttatgcttactgttttgattaagttcttgaattattttgtctattgcataaattgaacttggatcaacatttctaatttttatttccatcttgcaatctctcttctatttttgtcttaccatctaccctgttctaacttactagtaaagagcataaggaaaatctgtccccaaatagcaattcgcatttgggagtttggctgtgccaaacgattttctagttatagaaagtgggggcatctttattacaaattagtatcatttgataccatttcggggttttttcatcaatttttgtatataaaaaggcaggaatattattcccaccttcccatttttagtttttgaagccacgttttactgcatcaatattgccattgagttgagaaatttctttcttaatttggcgaatattttgcttatcagtattaatatcatctttcatatttgaaatttgatcatcaatttcttctctttgagtttgagaagctaatgctttttcttttctcaatttatctaaaactttttcattatgtgcaatagtatcttctaaagattgcacttgcttaagtttttgagtcttaactttgtagtaagattttaagataaagtttgtatagtgcttactgtaagttcttaaattacttgcttgtaaactagcatctttttcaacatctgattcttttgtatagaatttaagccatgaatctttttggaaaccttccgtatcaattttggagttaattagttcaggtgcaatatcataacgtaaaacattgaactttggtttcaaaccttttgtttcaatcacgaagtaatggtcatttacctttatcattttagaaataccattagctccaccatgttgtacaacagatctataatcatatttgatattagatagtgctgcatctgcactcacactatcaacatcttttttatcaccaacaaaaaattctgaaaccataaatccagtttgcggatttaacttacttgatattttataaacttctgccccactaacaacactttgattgtctgtacttttcaaattaacttttcctccaccagtgtaaagtggtgacatcaataggactactaaaacaagaactaagctccaaacgacacttaaaaactttttccgcttcttatatttcttgtgccttttaagctcctttactttattacttaagttcatcattcaacccttccttttcttgaagctgatattttaaatcagttatcttctcattttttctttctagtttctgttttaaaattgctgtttcagattgtgatggaacaatgtagtaagcataaattgcttgcccgacatttaacaacgctaatataaaaattattaccaacagtctatgacgttgaacttttaacttagttacttcagattgataaattgtccgtgacatcagaatggcctctttgctaaatattttttaacttcattaccaacaaatcgtgctttttcttttccattagttaattgaataactgttgggacttcttttaagaaatacttactgatgtattttctatttgctttttgattcaaatttatgaagcgaatatttttttgcataatatattttttaaaaaagaactcgttataaactttttgacaatctggacaggtatctttgtaaaacaaaatatcttcggttgctttcttaggaattacttgaacacttcgattagcttctacatgttgaactaaacttaagtaaccacaagttccaattacaaaagaaaaagtggatattaatacccacttcaaaattattttttggtttctgaagaaatttaacattcttttctcctttaaatatttattctttacattttattttttagttacttgaacgtaacttccgtgtcgtgataagttatcaaattgtttggtctttaaattgtacgaacaactaataccatcaataccagtatctacaaccatatcatctttttgtgtttgaaagttcactttgataaaaactggaattttttctgaattagttaggctaccaacacttacactaattgaattaactttacttccaacatcagcttttttaattgcatcaattacatttttctttgttggaaagtattgttcagcgtgcaaagaattagcagttaacattgattttaaagactttttcttgtttaaaaattgtttactagatttataagtataaagttcttgtgctaactgttctgctcgaagcttaacagcattttcttcatctaaagttattgcattagaaccaactgactcttttcgcagtttttgttcttcatctggaattgcattaatcatttgcttattagccttttgtaactgtacatcagctttagcttgttcttgttgataattattctgagtaattttaaaactgctcaaagtaactaaacttgctataaaaaccacgccagcaattgcatttaccttattcattgttccatcactttctctgtttgatatcttatatctttaaatgaattaatctttccttttacaaggtcataatcgaattcaaaactgatatttaaatattgctcactaccataaactttagacttatactctacgaagctaataatttttgcatgatgaacattatcaatattttcaaaatatgaattagcttgtgtattttcaatgtatgattcaaaaagatcttgatttactttatcttttggattaggtaaatgtgccttcttaaatttgcttccaaaagtttcaaccaactcttgataatgattttgataatcagctagcgagtgagaattaccatacaaagtagctaaccctgtatcaattttttcaattgcttctgcttctgacttcttaatatcaattttaaatttaggatttaaaggtgaattttttctatactcctccttttcttcttttgtcttctgcttaattacttttgtttgatttttagtttcaataatttcagaattatttggaatattcatacaagtaacagcaacagtcataatagttactgcacacaaacctatttgaaaggcttgtttcaatttatcatcttgagataacattcttttctcctatttatttactaattcttttacccaatcaatccaagtaccatcatcactaaatgatgattttaaagcttgttcaaatggcttcttagtaacaccaatgtgaacatgagttacatggtcatatttagtagataattcaccaatcttatcacctgttttaactttgtcaccaactttaactgaaattgcatctttatcagaattatcaaatgcaaattcttggtaaacttcatagtatccgtcatcagatttaacgacaacatagtaacctaaatcattttgagtagatccttggtgatcaacttttaccacttcgccatcatgaatagctaaaatatcttgattattatatttatcagtcccaaaatcatatccatcatgaaaatcatttctacgtcctgcatttggtgtgtgaccaaactgttgtccactttcaaaagttggagtagatttaattgatttaaaaggccaaccccaatcgcccgaagaaacaatagcacagcctgaattatcttcttcattagtatttgtagaaccagagtcagaagactttcctcctaacttcgatttatcagcagaaattgatgcaccattaaaaagtttatatgcagcttttgcatcagctttaatatcattaatctttgtttgagcatcacttagtgacacaccctcgtatttttcagaccacaataaagctgctttttctggatcagtttcatttccaactgcgctagctgcacttgcatatccatgatttagttcgtaaagcattaacttcatttcattttccattgtcaacgtgcttgtatcaccttgcttgatgaatccaccttgagtaattcgattaccatttaaagaatgaacaaaaccagaccattgaaatacacctgcaacaccaccgcctgtattaatcgctttagggttaaaaccactttctcgtttggcgtttgcaacggcacctgctgcacctgcaccagaaaaacctttttctttggttaaggtatcaaaaatttgtttagcatttttataagcagtcgttccttgcttcgtccaatcaccacttacttgtccagtcgaataagtatcagtattatcatcattatcacaactactattaacaccaagtattattgaaaagaacgttaaacctaccaaacaaatacctgctattgctgcaaaaaaaatggaaattaaaacaatcaatttaaaagtatgatgtcttaatttcctctttaaaatttcttttggattaaaccgctttgtaattttttgaaaaggagccattttatcggcctcccttgaacagtttcaattgttccttagttggttcaaagtgtactttatatctagagtcagtaccacctgttgaaactattccataacctcgctttaaatttggaatcgacttatagtcagcactagttaatgcatcaccaagtaaacctcgcatcttattaatttgagatgggtccattaacatagttaccttatattggcaaagttgaaagataacttttaaattatcttcttctgcattttgtgtatgatcaggaaccatttcttcaggagattgagtggcaaaaataattccagcgaagaattttctcatttcacgctggaagtttttgatgtattctacagcaaaaaggttagttgaattaatgatattgtgacattcatctaaaactacattgaagaagcggatatcaattggatcaatcttacctgcttcaagtaaagcagtttggcgacgcccattgattaatgcatggttccaaattaatgaaagtgcagtataaacttgtgcttgatatacgcttctactcattgttgaaattgcagaagtatcaaaaagaacaattctttcatcagttaaatcacgtaaagtagaatgaccatcaaaaatttgaccatagttacgaatcatagactccagaccaatgtaaattttttcaaaagttcttctacgctctggttgagcattaattctgtctaggtattctggtgtacaaatctgcgaaacaaaattggtaaattcgcttaaagttggatatgcttgtggatctaacccagtgatgtgtactttatgtggatttctattccaatcttcaggtaacataccccgtgtgatataaaaatcacgaagcaatgtttggaagtcttgcatttcaatttccttaaagtcacgatttaccattctaaacaaaattgaaactttggataaatgttgcatgaatgaagcaacttcatctacttcattagtaactggattaatgttagtagctgttacttctaacggatttatcataccttcactaccatcaagtgatactacaactccaccgtttgctttaactaaatcaacatattcttttgtcttatcaataccacgccacatcatgcctctagcaaacgaaccttgtgacaacatctttaacagagttgatttaccagcacccattttccctaacacgagcatgttaaagtcttgacgttcagcagttgatctaaattggtcaaaactaaaaagaccaccagcagttgttcttccgagaggtaaaccgtgggggtcgtttaaactttgagcgctaaatggaaagcctgcaccaagcgtaaatgcaggaacatcttgaattggtacacctacaaattctttttcttgttcagaaagtggcttaaagattgccttgtattgttgtggctgaataaaattataaactgttgacctatatcctaatccttttaaatactgtctaatatttgtaatcttctcttgtaagctctcaatagtttcactgtatacaaaaattctagtaacaaatctttttgcaatttcaccatttgaaagttgagcagcataattaatcaaatcagagtattcattttgagaatcgttacgatcagttgcgtgacgaccgttttccgttctatctcccaattcttggagcgaccgatcaattgtccctttaatagtttcaggaacaattgacttaacatcaatgacagtagctgtatggtcggaagtagttaaatcaattccgaaaaaataattcggattagttggataagcaacaactgataaacaagcggaatacccatcaccagcaattgcatgatcgtcatcaaaagtaataccacctagcggttgtatttttgcaatcatgttaacatcgtatcctgctttttcaaggcgttctgcttgttttttatcaatattttggagtggattaagtgcagggactttcttttgtgtatcaatgcttttattaaataattgacttaaagtatcatttaaattcataacattctccttttacctttaccgactgtttaagttgttaagatgataaattacatcttcagtttgttttttatttaaagtggttaaacctaacattccttgttcagctaataatgcagatctagtattaatcttaatggttttaagattttcaccaaatataactatgtaaaactttaactcttgatattcatcatcttctcgttcttgttcaattactgttgacaaatacccatttacagctcttttttgaatttgatctaccttgttatttgaacgttctaatttttgacgaatatgtcgccaatatttctgttgctcactggtatcaacacgtgttgataacgcaatgattttgtaatcaagaacatagacacgattaaagttcgcaaatgcatctacatacttatcctgcgtttcataatctagtgaatacatgtcagtagtatgtacttgaagaaaacgcatataactaccatctttacgagtcaaaataccatcttttgagcatgacttgaaatctataaattctagcattgatttatcttctggctttaagcccattgctgggcttgctcttaaattggccaaaagacttcttttgcctttatctttttcaaattcattaatccttaccatttcttacaacctctccttttaaatacaatggataatatttacttctatcttgttttaaaactgccaataaaactttccaatttggtattcttgttaggcatgtatttgcaattagcatcacacctaaaaacgtacaaaatataactaagcacattgaaaaaataggtgataaacctagtgatgaagctagttttaaacctaatccaagaaagcctattatggcaataatatccataagcgggacaaacataactgtcatatgatatttaattgatcttggcattaataaaattggacgtttatattgtggttgattttctgtttccattatcttttctttctccaaactttcttatcaacttgacgctttgttttgatgtttttatcaatcttattattcttcacaacgttaactcgatttgtagcaccttgagctgttacattcttagtcgttgttgtaccttgtaagttacttgttatatttgacatttccgaaccagcattaccctgactcactacttttgtagctgttggatttgtgcttatgttttcgctaactttgccatttctcataacattaacttgattcgtatcaccttgtcctgttacattcgtagttcttgattgactttgtgagttacttgttacgtttggcatagctgttcctgcactatcttgacttactactttagtagctgttgggttcgttcttacgttttcgctaactttgccatttctcataacattaacttgattcgtatcaccttgtcctgttacactcgtagttcttggttgactttgtgagttacttgttacgtttggcataactgatcctgcactatcttgacttactactttagtagctgttgggttcgttcttacgttttcacttatcttgccatttctcataacgttaactttatctgtagaaccttgtcctgttacattcttagttgttgattgaccttgtcctaccttatctacaggattacttaaattattctttgcatgattaattaattcactaccagtagttgctgcatgggtaatatctttgattgatctaccagcagattgattaattttgaccttttcgtccccaccttgtgtattaatcgttctttcagaagatggtgcttttgttgtagaagcatttaaactacttgaactatttttatttgatgcatccaagttattagtctttaggccatcattaatctttcggtcacttgaattattagatttaagaacagattgtagatttgaagctgtaggatttgttccttctgttctgttattcatgtttgaatttgaagcgcctttattaggtacatcatgtgttgacttagaaggtgtagcaaccattgaagatgggttaaatgcagttgttgatggttcacgatgaattgcattcatttctttatcagtcaatcctttgtttccaaacattcgtttagcttcatttttagctgcactagccataggtgagtctgaagttatcttgcctttattaagcattcctttgacaagtccatcactaccagaagtagcagttctccaagctcgatcactaccaccagctgctttaaagtccttatattgattttttaatgaatttgctgcatttttaccaatcttacgtgcctcatcttcactgtaaccatctttcagagcactatctttagcagctttattaagagttctagcctgcttatttatatttggcttacccacggatttaacagcctttaagccaccaaccgccataccaactccagcggcgccaacaccagcaagtttcttacctgcacctaaagcttgatttactgtcattgcagccataccgaagccatgttgtgcacctgtatcaacaccaaagaacttagcaactttttgagaaccactgaataacattacagtcgcaacaatcataccaattgagtaaagccatggatctaatcctttatttaacatccaaagaatgacaattctatagaatgctaattcgataccttgaaaggcaattgtaattgctgaagtaaagatatcagatacagcttgcttagttttttcaccagattcaatgtcagttgagaaaatcaaaacacttaatacttgcataattgctaaatcaaggaagcatttgataaccatccaagtgataaagaaataggcaattgttaaagctaaaagtgaaatgacaactgggaagaatgctacagagtagcgttgataaccaccagaccaagcagaaaagaatggaattgacttcttatcaatctttacaacagttttggctggtgaaccatcagaatttgtaccaccgtcgataaagtgatattgcaaatatttaggttgaactttcatttgatttggcttgtaagtcttttccatagatttctgcattgcttcagctgtatcaggagtaatagctaaagataatgaggatggagataattcttcgaacgatttttctgtccacgaattattaccataatgttctttatactgattttggatttttccagaatcttttgtactatagcccttccagtttgagtaaaacatccacatcaggtcatttgatgagcctttaattacgtcaaacgcaatatttgacgagccttttacagattttccatcaactttctgactaataccagaggttgtaacatcttgataaaagcctgttgattgttcaactgcccaattagtaagagtctgaatattgaacattaaaaatactgcaatcattgcttgtaaaataatgtttgataccttacttttattcttaccaaacatgtacttaataccaacccaaaccatgactgcaataagaaccgctgcggatgcacctaagacataactttgtgccatatcacttacaccagctgatttaagtaaatctttgaacgtaaatgattcagtaactaggtcttgcgcccattttgctattccatagagcatctttataattccccagccaaacgaattgaaaatttggccaacaggatctacaaagtgtaagtaggggtgaatgttatctaaagaattggctgcattcgttaaatcacctttagtttcaccaccaaaatattgaacgactgcatcgccaaaactttccaaaaataaaaaactttgtaaaaacaactaactaaccttctttctaaaaagaaaaaagccaaagcattaactactcggctttactattttgtaaatatttaaaaaattcattcatcatatttcctgaaagcaaagtttgcaattgattttcatctgcgccttgcattgcttcagtacaaaactcttcataaggaatttcatccttatatttttccgcaaattttaaataaatatctgttttactattttgattactttgcggtgtaaagaaatgactaccttcatctctattagatttagtttcatcatattcttcttcattcttcaaatttactttttgacgtgcatcaaaggcatctaaagctctatcatcaaaagttatccaatttctccaattaatagagagagtttgtaaatctaaatttgcatgtggtgcatcaatttctaataagtcaggactctttctcgtatcaaattcatcagccaagaaagtatgagcaaaaggcataattgtcttttttgtattaaaaattgcatatggtcttactcttctaccttttaagtcttgtctgtacaaaggtcttaaaacaacggtttctcctgcaagcatatcttttaatctttcaggcgtaattaaaggtactttcattgacgatgtattgatagattgagctgtattcataacagttttgtgtatgttatccgattcaattgtatggttaccaacttgctcactaaattctttattagtatcagtatccaaggacttgattagaatttgattttgacagttttctttaatgacttggcctttatctttgccgtattttgcaaaaagttgtttatatgactggataattaaatcaaaaataatgtttctaccagcagaaactgtcataatttggtccatatctttaattggttgcatatttccaaattcatctagaaggaaatgaacacgtttaatcgttttaccacctgcaacatatgagcactgttttgcaagttcaccatataattgagaaatgaaaattgaagctaatgcattgtttgaagaatcgtagtctggaactttcataaaaattgctgtaggtgaatctgaataagtcatatgcacatttttgacctttagattattttttaattcttttaaagtcacaaattttttactattaagattcttaatttgataaatactacttaaagaatttttattatctaaatatttgagcattacataatcgttattactcaattcatctgcaaagttatattccacaaatccaccaaattgtacctttacagtgtattttgctttaacctctttatttttatcaaagaacgttagtttcaatcgcttattttgataagctttatctaaatcaaagctgaagtattttggaaatcctactgtctttaagtccaatgaattttcactggacattcgagccattttgggcattgaaaagatagataacttttgaatgatggttgaataaattgagcctttggctttagcttcagaaaaactagttgaaccaaattctcgtttggcaattgagccttgtggtaaatgtttaaagaactcgtctaaaacattagtagtattaaagccatcaggatctaacgaatagttaacagttcctagctcgttcaacatatcaataatgttattcaaagtgattttttctggacaattatgcttaatgcaatattcaattaaagcaataatcataccgttaacagctttttgtgcaccttcataaacccaagaattagcacctgctttttcttcatgataaagcgtataagttaaactattgactagttgcatagcagtttcaacatcaccttgcatccaagctttaacgattaactgtagcggattataagccataccctgtgatggatctgctaggttaagtaaatagactttataacctctttttctcaacgtttcactagcagctgcataaagttctcctttcgggtcgttaataaccaacgaactttgtttttcagctctagataagttatcaacacttggtataacagttgtttcaccttttgcagatcttgatgcaccaactactacgctatgactagtagtttgatcaatgaaatatttttttcgataatgagaaattggaataccaccatatcctttaaacgatggattttttctattattagttggtaaatcatggtctggaattgatggatactgctcttgtaattcttttaaagtagtaaacctagaatcaccttgttggccgtaagctacttcccttactcgcataattcattttcttaactaaaccccagctaagaaaaattgagaaggcgattattatgggtaagtatttaaaattgatagaattacctagcaagtttattccatttttaaaagcaatatccgcatctaactttgaggtgaaaaaactaaaattaggctgttttgtctgcaaaatcaacaacttaagactattagcaaaccaccataaaataataaaaaatacaatactaaaagctactattattttaggttttgatttatttgtttgtttaggtaaatcttctccttcaattttataagttcttctaaaactgaatttatttttgataaatgaaaaaagctttatcagaccatcacttctttcatttgtaggttctttatttattatcattttggaccctccatgcatttgcccaatctttgttggcttgaaaagctaaaacaagtgaatttttagcgctatctgatatgaattgtttttcatatgaactcatcttttgataagtagatctaattgcttcttgatctcctttagtaatagctaaatataaagctgaaagattagttggatcttctaaattaatggtttgtaacgatttaatatctttttgacctaaaagtgagttcaatatatttaccttgtctgcccaactttttgaatttttgtaatcactcaaagcatcaaccttttggattttagctttacttgatgattttgtttttggcatattaatttcaatatttggttgttgagcagttgatgaactcactttagagaaattatcttttaagctaattgcactaaaaaaagccacgcacaaaaaagttacaagccctaatcctaaaaacttacttttcttttttgtggtggccaattctttttttaagccattaacctcattctgtaatttgaaagtattaatttcattaattgctttatttaattgagcctgcaattctgcattttgctttaaaatttcttctaattgcttattttcaactgaatatggttgcgattgaattgcaggagcaacataattaggaagttgaattgtaggagttggtgtaacttgattattagcattagaaatagcttttgcaatttgatctggaaggttattcaaatctgattgtttcttttcagctaaagctaactctttttccttctgcttaagctccaattcacgcaactctaactccttgtcttttcttctaccctcttcatgcttttgaactatttttttcttagattcctcaacgtctttaatgacttcatttaaaatcgaggtaaatgccttattttttgtttgataagaatcatgaacattttgaataaagtctgccgcaattttacctctacaatctttcatatcacgattacgtgctctaataatttcgtctttcgcatcagcttttgctttatccatttcattttccaaaacttgatctgcctttgctttattatcatttaattcttgattggctctagaagagaatgaagttaattcatgttcattttgttctgaaattcttgcttcatattctgttactttttgcgtaaagatattagataaatcgtccttcttattagcgatcaattgtttagtatctttatcaagttttgccttcttttcttcagtttcttgctttaattgcttaattttttctgcaacatgtttttcaactgctgaagcaatcgtttcattatttaattcatcatattttttagctaaagtatcaatggtttgattttcaaactttgcaatatcatttgcatactcagcttgaacactatttaatccataattattgataatttcatcaattttactattaagctcctcatccaacttattttgaggagttttcttataacctaaatcagttttaatttgttcaattgcaaactgactaacatcatatttatctacaattctactaaaaatatcttctgtcgtttcaaaatctgcactagaaatcaattcttcatgttcttccccctttacggggggagtttcagtgacttctggtgaagaattaggatttaaaacagtagtagtttcagaaactggttcatatgattgtgcaggatatgattgaggagtttgtgatgcaatattcacattagaatcagctaaagctgcatttgagtaattagaaagagctggactataagattcttcaactggattattagttacttcttctggcttttcttgatactcacctgcttctgctggtttagccttagcatcagttactaaagatagctcttcactattttcttcatcatcatctaaaatttcattttgaattttttcttttaaatcttccacagtttgataagtttcatcatctaactcatcattttcggaatctcgtataattaaatccaaaataccattatcatcagaatgaatttcagtatcaaagctaaatctagtattaccttcatttctgctttcattctcaataacgtcaaatttaatagcttctgattgatgtttagataactttttggcaaaagcctttattttttcgttagcttctgaaactgaaacgggcttagcttttttaaatagccctcctgttttaaaaattgcttttcctgatcgtggataagcaataaataatacttcaatcatttaattctccttataatttttcaccgttatcaaaatatctttttagtttaaaatgtagcaccaccgaacatactgaaaatccaaggaataatttgtggagctaagataacaattactgaacctacaatcgccgcacctagccatgctttagctttttgtgcttgttggccaccgaataaccaaattaaacctacaattactaaaactgcaattgctacgaatcgagcagtagttgttgcattagttgtaacgttttgagcaccagtttgtactctaccccaaacactaccatctaaaaatactggaccagttgcataaatatttgataataactttaacatgataaattctcctttaagtaaaaaaataagcagccttactggctgcttagtcttagatttatttttatttgattgttgttagataagaaaaaagagctgatggttcagctctaatttggcaatttggattattcatttaatgtttcttctctttattaaaattaggtttattttgcttgttttctggaagtggacttggtttagattccaaggctttctttttatatagttggtttaaaccatcaagcaaaatttgatcacgatagctaccttttccttgaattagtaacataccttcatttgaacaaagcttattttcccaatctcttatagttaaattggtttctttttcaataaacgctcgttcttgtttggttaaagccataaataaaactcctttcataaacaaaaaagccctcttttttcaaagaaggctttcacaatcatttttgatttacattattattttatttccaaagagagctaaagaattgaacaactgaatcccaaaagctagtctgcttaccagtttgaaccatctttcttgtggtggttgttggcgtaattgcagttgacttaggataaattgtaaagtccttactatactcaccattatcatttgtaactggagtgataattacaactggtgaagaattagttgccatactttcttttgcggtatctgtattaacaacgtagtatgcatgatatttcccatcaattggaaccttcacacgtgcaataccatctttatttaaggtattatctttcgcagttgtaacttccgcaaatttctttagttgactagcattaagcttctcagctcttgataaaacttcttttctaattgtgtcatttttacgcatatcttcaattttagaaatcaaagactcttcatcattagaagttgttttagtgcttgattcactactttgaacttcagaacttgatgaagcagttgaactacttgatgaagcgctagctacacttgaactgcttgagcttgttgaactttctgttgtacgttcccacttggcagaatcaatctttttagtagatgatgaactagcctctgctttagttgcagtagctacatcatctttaattgctttatcaatagcttcatcagatgcattttcatcagacttaagttcttccttaatgacttgattcattaaatcagttacatcatatactacaaatttagctccattagcgcctttagcattttcaatagatgaatcactgcttgaagcgataattttgttaataatcatagtttgttctgttaatgtttgaattgcatcattgctactcttgtctgatgaactagaagcactttgactttctgcagtcttatttttttctactactgaactttgaactgctgaagtattactactagtttgagaagaaatactatccgcaaaaactggtgcagctaaagttaaagccgtgcttgataacatagaagctgcaactagcttactttttttgctcattttttctttcctttcttacgattaattaatttataaaggccaaaaagacctaataaaactaaaatggctgtaattgctgcttttccaagcgaagttataccaccatcattttctattacttgtttatcagccttataaggaactcggtgtcctctaactaaaagtcgatgagtattttcaaaaagtggtgtacaagtaattaaggttaccaaatctttatctggatcaatttgaagatatttgatgttatttggtaaaacgaccttaatttgatctaccttataagcatgaatttcgttgttcaccttaatgtagaactcatcacccttttttagtttaggtaagtcagtaaatagccgactcaagcttaagcctgaatggcctgtgattactgaatgatgaccttttcctccaactaaaggagaagtgttttctagaaggccaacaccattatccaatgcaatttcagaagtattatcgtaaataggcaacacttctttaattttagggattgaaagaacacctactgtctttaattcagactttgctacatcaacactattagacttttttgttttcttttgtcctgaaaacgggtcttgcacagtttcagttgtagtttttttcttataaaaagcagataaatagtcagctttactttgagttctatcagttttattaaactgctcaatttgtgctttttgcttttgcgctagaacaaaatcacttacaaaagggtatgtgctagctgcaacaataccaaaacaaatcacaaaccaaagtaaataatacagccagtctatttttttctttttaggtggttcatttctatagattttcatgatgatttattaagcttgacgcttcttcatcttataaccagcatatccaagaactgttactgtaatagcacctgcaccagcagttaataacaatgcttgactaccagtaaatggcatagttgtcttttcattgttcttaacgataattggattagttaaagtttgagtatcagtatccttactcatatggaaattcattgtttcttccataagttggtaacctcttggtgccttaacttctcgtaacttgtagtcaccttcagtaaagccgtgtagtgagaacttaccatctttatcagattctaaaataccttccttaacgtctttatatgagtcaacccattgagcaacttgtgctttacgttctgaatcatacttagtaccgttgtaccatttaccagtctttaaatcttgaacaacgaattgtgctccagctaagcgttgtgcaccaatacctgttcccataaatccagaactttccttaacgaagttgataccaaatgtgattgttttatccttacgatcaatttcgtagttacctgaaccgtcgttccaacctaagtaaatcttgttaacgatatcggtatcagtctttgcatcatctttaactacttggtcatagtcataaaatagcttcttacctgcttcttttgctactgtatctgatacatgaccagtcttaatatctttcatcttagataaaatttcactagaactcttaccactctttaaagtgtttaaagttgctcgttcttcttgactaataccattaattgcatagttaacaaagaattgaccatcgcttgaagtataaacctcatagtctgttccttcctttaaagtagtaccatttgcagttttaattactaaatgacgaactgcttcaacatctttcaagtgttcttgaggcacatctcgtgtatagaatacgtggtaagctaaatcacgttgttcggtattaccattttgtgttccaatttgccaacctgaacccataatattttgtggtacttcgatgcttgacttaaagtgtgctaaatcaccacgatgtaaagattgtgaatcgccaacaccatttgtaagcttcttagttaagtctggtgtaccgtagtcaattacagtcgcaaccagcttagttggatcaataccattttcatcaattgtgaagtaaagcttgttttgtgagttattacgtgcaactggtgaaataaaggcttttgctgtagttgtatctgggtctggttgatcacctgctacatcacttggcacttcgacaaagtagtagtcgcccataattaagttatcagctgtaagttcaccctttgagtccgcagtcaacacaccgccaaccttagtacctgaacccggtttaccacgataaagttggaatttagcacctgctaattctttaacatttgcattgtcaccattgtaaagtgccttcttattcaacttaaacttaagtttttgcactttgttctttggatagagataagtagtatctaagaagccatcaccatttggattagtatatgggttaacaaatacaagtggttcagatggattcatgtaaaagccttgaggagtcttagtttcaatagctgcatagtaatgatacttttgaggttttgaagggtcatacgcctttacattttcaaagcgtacattaccgtctttatcaattgccttagttgcaaccttttgtgcgcccttcaaatactcattttgagataattcactagttagtttacctgaatccattgtgtgtacatcgtcccaagctttatcaaatgaagcttgaattgacttggtaatttgatttacacgatacttttgcgcattaacatcacttggatctgtcgcaaacccagttaaacctttaccatcgttaaatttagaatttacaacatcggtaatatcatacaaagtgaactcaattttacccatggtatttgggtcataatgtgacaagtgagcaggaaattcagtatctttctttgtaccatcattccgaatcttattgttttgaatgtaactagtatcattcttatcatacattgttttatgaatttcaatgttagttgttgatggagctacttgatccgcctttacaattgcagaatgattaaataatacgttagctgcagatgcattagttaatgcaacaccacataaacttaaagttacaccaccaacggctaaggtctttcgtaaatgcttaaatttaattactttattcatattaataattctctccttcatttaaagtcccttggacaactaatctagtagcaccacctgctgcacaagtataaacagtcacaagtggtgtttcatttccctttggtaaataaaaagcactaccagctgcagcttgtccatttacaaatttcacatatggactcactacctgcttactggtaatgctgtattcataatttctatcttggccatgtagaataattttttgaccaattttaactttatataaatcgctcaacaacacgtgaggtctttccatgttatgacctgctaagacaaagtttccttgtcccatctcactatcaagaaaataatcttttcctaccccaagtgagagcgtgtaattattagcacgattatatattggtaaataaactcctatactaggaatatcaaggtatccattaggatatttatcaaggttcatattgaaagcagcctttcgatactttaataaatcatcatcagtgaactgtttaattgacgattttttcaaagtagcacgtggcatctttcttgtaattggtgcatcaattttgcgatttagcaagttctgattagctaagtcactttgatacttccagaaccctaaaatcccaatcagaattactatcaagctagtaatgacaataccttttttttttaagattgtcattttacttacctaatttttcgcctttctttttgcgatagtacattaaaccacctgcaccaattaccataactgtagtaaaggcaccaattgctaaaaggcgcttacttcctgtagtaggaattgggttagttgagtctttcatttcacccttaattacatctggtgatggaataccaacttgtgacatcttaatagctgtcggacttaaagagtatccgtttggcgcaccaacttcaactgcgtaatagtcgtacattccaaaatcttctaccaataccttattgaagcttaaattcccatccttatcacttgttgcaatatatggactttgatcttcatgacctcgaactagttcaccatttatttgacgataagcttctttcttagcagtcgcaattggaatttgaacattggtattgttagaagttgcatcttttcttaccaaaacgaacttagcacctgcaactggcttagacatcatatctttcttggaaattacaaagtctaagtatcttctagttttccaattgactgtcgtttcggtatttaccttaacgggatatgaaacagtcgcaattctagtaacgttttgagtattagaatttggacgataagcccaaccaacgttgactgacttatcccaagtggcttctgctttaactttgaaagacttttgattttgtttttgaatgttataagggatttttacagtcaagttagtatcatttaagacattatttaaattggcacctgtaattgtaactccatctggtgctccttcactccaaactttcgtatcatgaacattttgagattgaagattaagagtaccctcataatttataccattatcaccagatggacgtgcacctgttggattaatcattaattctgtaagtttatccgtcttagaacttggactagcaaagtataaacgacttgcattatttacatgttcactttctgaatatgacttaatggacattgctttattgtacaagtctttaagcttttgaagaactgtcggatcaaactcactagtatcatgattcatataccatgtaatgttatggtcatagacatatctttgacgtgaactatcccataatttgtaagtataatcatttggactagctatccagtgaattacagactgataaagccagtagtcaccaccataccaacctaatgaacgatatctttcaccaccatgatcagtgctatagaagtcatttactagccattctacttgcggacttacacgaccttttgaataaacagattcgtttgatggactttctttttcccagtttaaacagaagaaaacattaccatcaggtcgcttcataatatttacagagtgtggtccaaatggatcctcacgcttaccattagcacaactaaaatatcgagccgttacagtcacatattgtggcttgcttggatcatcataagcttttacaacccctgttgggtgcattactgctacaccagttgttgctaaaaatagtgctagtacagttttactagctaatttattaatatgcatcctcttatcctttctaaaaaagcaaataaaaaaagcattcctcttggaacgctttaattacttgttattcaactaaaaaatattattgtctttttcttttggctacacctaacattgatcctaaaccaattaaggctacacctaaacctgcaagtacagttgattcattacctgtttgtggtaatgtatttgcctttactaatgcacgatgtaattctcttgtcattaccttcttagaaacaacacctactaaattacccttagcatcatatacttggttatcctttacaacatagccagtaacttcttttccttgtgcatcaaataatttagatcctgtttggtagaagtgggtagcttgagcacgctttactgcagcttctttagcttcttcttcagctttcttcaaagcttcttctgctctttccttttccaagatcttgtcaagaactgcttgtgccttagctaattctgatttagcactatctaacttagcttgagcaatcttattaacaccagtaaatgcgtctaaatcatcttgtgcaaactttaagtcactcactgcattatcatatgcagtcttagcagcttcataatttggttctgcattagttaagctatcaagttttgcctttaagctatcaactttagcttgtgcatcgctaactgcttgcttagctgaagttaaagcatcttgagctgatttaagctcattttctgcttcagttaaagcattttgcttagcagttaaatcactttcagcactagctaagttcttcttagattcttctaatgcatccttagcagattgtaagttagcttgcttagtagctaaatcagcacttaatgcttgaactgcttcttgagcactagctaacttagcttcatcagtagttaattgagtcttagcagtttctaagtcactatctgcttgtgttttagccttttgagcattagttaagttagtttgagcagtagctaaattattattagctgtagttaaagcactttgggcttcatcattagcactcttagcagaagttaaggcatttgacttagtgtttaaatcactttgagcagttgttaattcagcttgtaattcagtggtatctacactaggaattgttaaacgaccaccttcatctgctttagctggatcttctggatagaatgtttcaaagccaatgatattatccttttgtctaacacctaagccaaagtattcatcttttactccgtgaaattccataccagaaatttgcattgcgtgaccccagtttgaatatgcatcatcaaacaacatttgaagcattaaatcataaactgcttcttggagatcattcatagtaatatcagatccacctacacctaaaccaatagattcagcttggattcttgcttgaagaacagccttgttaacatcttgaagtgctttatcgtcatgttcaattccagcaattgtagaattatcggcaatatatttggcaaattctaatgatttattggttaccacaattctattagaaagtcccagttgcttacgaatatcatttaaaatacctgcagtccacaaggtaatttctttttgttgttcatctgttaaacgtaataaaccaacaactcctcgtgaatcagcaaccgcagcaatcttttcttgcttagccttttcatcttctttgtacttattcatagctaagccttgcttacctaattcagcaatattatcttttgcattgacataacccttaggcatttcaatacggtttacactgttaatttgatcattaatactatttactttagtttgggcatcattaacagcgctttgtgcttctgcaagtttttgtgaagtagtatcagcgttagtctttgcagtttgagcagcagtttgagcagtatctactgccttttgtgcttcactaactgctgtagccttgttagttgcatcagttgtcttaacttgaacattagccttatcagaatctactgctttttgagcatcatctgcgtttttacgaatttgttcagcatcagtaccatctaataccttttgtgcattatcaacgcttgcttgttttgcgttaacgtctgcggtagcttgatctacttttgccttagaggtattaacatcactttgtgcttgcgttacagctgattgcttagtgttaacattgctttcagcttgagaagcttcattttgcttacttgtaacatcactttcagcttgagaaatatcgctctttgtcttgtcgatgttttcttgtgttgcttcttgcttagcttcagtagcttcatcaagtgttgccttagttgaatctactttagcttgtgcatctttaaccttttggtttgcagtatctactgctttttgagcaccgttagcttcagcttgttgatcattaacaacttcttgtgccttattaacgtcagcttgtgctgattccttagttacttgagcaggtgtagtagttgtggcacctgtagctgtagtagtttcagaattagtctttgtttcagcatcacttgttgcagcttgtgctgtttgtgttttagctgccattaataaagttgctactgctgtagcggtgtacaaagttttaatattctttttcatgttaattcctccaaatccaagccacattcctctaaggcttgtccctcattaaattaaatttgacctaactttttacaaattaagtttacaacataatctttgattgcgcagcccttaaactgcacatatttaaatatttatctaaaatacgaaatatatttctaataaactgctattactatattgtattaaagataaatcagatttctaacaataatatttttcaccaatcttctctttgactaaaaaaatcaatgggaagatccccaatataatagacaaaatgaataaaaataattttatttttttcattctattacctctaaataattagaattgctaaaactaagacaaattttgtgataagtaatatgtattttcgacaacattagtaattttattcttcttatatttatgttttagcaaagtaaattttctgcttgttacatattggaagataactaattcttcactttgcgataacaacctgaagtgctttggatcgttgttatgcaagcgttgtcgcttttttctataagtagtaatcgaaatctccttagtatttgaagacttcatgaagttatataagttgtagcattcgttcatagaataccttcatttcttaatttaaaaattttatcacgactttttggtggcgttgtttgtgcacggtttaacgaaccgaccgagaacgagaagagtttatggaatcactcataaccgcactattattgcaagatatgatagcggataattatgcgtccaactatctgcgtataacccaaatttctacgctttttatgctcaagccagccagatgattctactgaatcaaagggcactaccacctacctagatctctagcattttttcgctcttacaggtttctctaacctaagttgagttttcttacaacaaagtttgcttgactttgatccacctcttaaatagcgcaactttagtcaaaaccaattgctaaagccttgctaagtgaaaatggagccaatttgaaagagaacaatttttctgtctaggggcagaattcctgcgtattattcaactgtcaatgtacgtgaagcattaatcctaaaattaatactcctaaagcaaattcaggagtcgaacctgaactaaaccgtttttgctaatattttataaagagctttttcttgacccacttaaagataagttctttttccttgtcactaatcttatctttttggtaattctctttaatggacttaagtagtttcttttcttcaataattgcattaatttgtttatttattttattaatttgatgcttagacccttttttctctaaaactacctttttttgtaataatgccttttccttttgagtcaattggagctgatattcatttgaattattttctaattgtcgcctaagctcgattaatttctttttagcgcttgaaagctcgaagaagaaaaagacaacaatgacaattattgttattaatcctaaatatttcatcttttatacctcttaaataaaggatgtgcaggagtcgaacctgctaacaatttgctactcttaagtttggagaataatataagtgtttgatttatgaaagaatgttttttactttttgagggaattaagagtcacaactgttaacaccatgccatccatgataaaaatcacttaagcaaatttataagcatataccctaaaataattgcctcaatccaaagtgttataagaaagtatgctatcaaagtatttgacaccttatctagcaccttagcaattttcccccaagctgtttcaacttccgatttatcagccttatagtaaataattgagattattaataaaacaaagaagtagaataataagactgctttccattctataaaaaagttatctaacattttctttttcttctcttagtaatcagggctgattgttttagtggatattttcctctatgcggatattttctgccacaaatcaaatttccattaaactcccaccctcgccaaataaacttgtataaatgttgaatactttcttcatcaccagtaacacgttctttaaaaaaactgttaccgatattgacccagcgtgagtgatctagcaactgaatttcataacaaaattttaaaacatcaatttcatttaactcattgaaatagcctttcttgaagccattatttttcctcattagaatttttttctccccaaaataatgcttacttgtttaattatgtttataattatactcctaattataggattgtaaagataaaaaataaaaaagcaaatgaaaacatttgcttcaaaatttattttctaaaccaacgtaaaaaaaatggataaatagtataaattagtaaaacaactactagcataaattcggctattatatatagtggatgcatgtatataacatgataggttgaagcatagataataattgctgacactaaattataagcatagagaaccacataatcatatttttcaggagtataatcatcaatattaaatccagtaagtatacttccccatattattaaaaaaccaattgcataaattataaatattagatttccaaataatgctctcatatattctccctctttctacatatattatactccctattctcttattacagatatatctttaaggttgaaaaatcactttcataccattatctgttgtacttgcacctgtagaataattaaatgctatgttaggttgaacgttaaaaatataaacattgaagttcaacattctatcactagtaacagcttgtaaattaataccacgagccattaattcattacctctaaaaattggtgttgcttgataaattactcttttacctgcttttaaagcatttcgaacttggctctcatagtaagtctgtacttcttgattagcataggcactttgcgtaaataaatttttaggattattttgatcacctgaagcttgtcctacatattttccttcattattaatacctccagaaacagaatatgcaatcaaatgacctctattataaacttgaataccatttttataaggataatgccaacctgtaggcttaatattctgacgacttcttaatgcttgattagcaatatttctaccttctaaatatgcagttgcagatccagatgttcgatttaatgaatccaaatttgaaaatgtaatactattatttttccatgctgaaaaatttaaagttgaattattgttatttacataatgaaccgcattttgaccagatttaaaatctagtttagataattgctcatattgtactgatgatagacctccaatatttgaaggtacaaattgattagaaggcgctgttccttttaaagaaagtgccaaccaaagcaaaccaaaaataattactgctgttaaatatacatgtgatgcttttttaaatagccacttcatttttatcctctttttctataaagtatttatttaattcatcgctagaaagtgctagcgcatattttaatcccacatttttccaatattcttcactctttttttcacgtattaaatcaaccaatatatcattttctcttgcaaaatcaggtattgctatccaagtgcatattttgcttgctttttgaagatgattagagatcattattatcggatatcctaaataattttggtctactttcaaatatggtttcaatggactatcaatatctgatggcattaagacaattggttgatgtagatttactaaaccatacatagttttgtccctctaatagttattgtaaaagcaataataaatctaaaattatagcacccaccataacaagaaatagaaaagatatcttgtagtttataacaagagttgatacctcatactcgactatacttaaataagtatcaatttttttatttgctttattctcaaattcacttgaaagcttaatatcattcaataaagcttcaagttcaaaaatttctttatatctatcagtatcttttgggatatttatttttccttgatcaattaaatagcaaattttattgatttgtttttgcctttcatcttgtttttggcacttattctttttgttatattttaaagcacgataattcatccaataatttaaacgttctaaaatgtaatttggttcatttagcatagttcctcttatttatatcctccaaattcaattcattagatattctaaattgctgtacaatttttaagttatcatttatctcattaagtatagattctatcttttcaagcttaattaataactcagtcggatttaggttatttccttcagctttatatgtttcattaatttgcttacttaacttttctattctttgtgcatcacaagttacttgtgatgtagctttaattgcacgttcattccacttatataaaaggtcactataagtttcttcatcaaaaagtgatttattaaacctatgactaaatttatctaacaacttcatacttttctcccttgtaaatattcaacagtagtgtcaagaattacagcaaaagcctttaaaactggcatttctggaatttcctttcccgtttcatatctggaaattgtagattgatttacttgtaatcctaatcttcccaacaaatctgataaaaactgttgagaaaatctatgtttttttcgtaattgcctaagtctatttggactaaaatttaatttattgtttgtcatcgttatatcttccttccaaaaaaattaaaataaattataaattgattatagttataagtaatgtacaaaatatccccaaaaatgatagtactaactctagtcgacttggatgaggtgaaaccacaagaggcaaactaacgctaaatgtgaaaagataaagatttaagagaaacccaaacataaaagtatcaacacccgatatgataaagattgcactataaggaaatactaacaacaacataacaatcaacactgtcaaatcttcctcgtcttttgctgtaaaatcttgaatgtttaacttacacagtttgcttactgtataaccaatattaacaattgcataactcaaaagaggtataaataattgaatgtatccgagttcctttatcaatggtcgtgaacttaacacaaatgtcaatagtgcaaatataataaaagaaccacttaattctttaaatgtattatttttttcataatttttcttctccacaagtgtcatccttcgctaagttttgaatttcttgaaaatgttcaattataaagcgagcatctctaataaatgctttccattctttaagtggattcaatctgttttctttacactttttataaaaaatctctagcataataccttcagtagacttaatagagctattacatagttcttggtctattttttgaataattttttctctttttttaatcatgctattctttaactccaattctgcatatattgatatgcaagtatcgctgtagtgaaaacgtcatcgttatatccattaatttctttgaaagttctaatgattttgaatataagtcgctattgcatgggccagtggtttcaacattaaagtccatttcaaaaaaagagcactaagcgaaaaacataccataaaacaccctagtcgacttggatgatgtggaatgaaagccaaactccagacaagtgtcaaactaaaaaccataaagacaaatactagattagttgcattattaatactcaatatgatatagattacaatcagagcaattggcaacaaaaataataaaatcaatccactcaaaccttcctcgtcttctgctgtaaaatctggaatgattaacttacatattctgctgactgtagtacaaatattaacaattgccaaactcaaaagaggtataaataattcaatgtatttgagtgtatcctttcccaatggccgtgaacttaatacaaatgcaaatagtgcgaatataataaaagaaccactaaaacgaataaaagtaacaattaaatccattaaatgtattattttcttgaataatttttttctttttttaatcatgctattctttaactccaattctgcatatattcataagtaatcgaataaatatgatctctatttattgcgataaatatttcgttttcattaagccgttcacaacaattactgaatatttcagcaattattttagtttttataactggtaaataaattaatttttgattttgatatctatcaataaaccctttaatagttgctggagtagaatcattatctaaatgtcttacatatattgctgaagttgatttatatatatcgttattatcaaatctatagttaattcgtaaaacacgctctatttgcttatcttgattgtctgctttcattttcatattcctctattcgtaatgtgtgaatgtcatttgctccattctaaaagttcttggcctactacaggaattacccataaataccacccacacgtgagaagtattgccaatataattaatgtaataactcctttaagagaaaaaaagaaatcaccaacaatatccgaattatccgtatccgaagtgtcgctacttgaaacgtttttcagttctttttggcaacattggcagtcgcagtaacactttttttcttcagtcatcttcttcacactcttcatcagctccaatatcaatcagcgcatcacgcaagcagttatattttgtttcggtataaaaatctgctatacaattttgtgaacaaaagaagtcgcagtattggtctgaatagattggagataaacatgtcaaatcttttttgcaagttgtacatctatctatatctggaggcaatgtaacatttactaattcaagaccaataaatgcagcagttagtgactcgaattcattctcaatgacaaagtctgctaaacaatcttttgaacagaaaagaagatcatctgtttgataaattggattgacattttccaaagactttttacagtgtgaacaacaagtaacgtctgatgtatcaataatattttccattgctagtccctctcaagatattgaatttcaagcagttctttatcatcgtcgtaaaagcttgaaagaacagtattacctactagcttttcaaaaagagcttcgatagtatcgtctaagcaatcgtcttcaaaatctaaataaactgtcttaatcatttatttccctctctattagcttcttcaattgttttgtattttctataagtgtttctttctgctaaacaatcaattgagcaatatggcatatccatataatcaacataaactggacccattccgtataagtccataccgcagttttcacagtaatggtcttcatcattcatgttctatcttctcctcgtaaaattccttaaaaataggttgatactctttatcaatctttcgattgtagctaactgtaactttaaaagtagtatcgttaagtagataaagaacaaaatctatactgtcttctttgaagtcaacatcaactagctgaaatacagattctccagcggttgaatatactgaatttaaaatgctttcggcttgtaatcttaaattatctttttgctgtttacttaactcattcatttgatttctccgctttcgtaatgtctaatattgcgcttagtattaattcctaaatgcttcctcaatttataccaagcaatattgcaatgagcagtattactattatcaatttaacgctgaatataaaagtccccctaaataccacccgcacgttaaaagtattgccaacataataaccaatataataaatgtaataactcctttacgattgtttacatcgaaattgtcagcaatttctttccttttatcttgattacttgttttcatttcacattcctttattcgtaaaatcagtttttcaaaaattcttgcattacttgtacgatgtatggccaccaccagaaacgaacgaaagtacccaatattgtaaatataataagtccccaaatagaattaaaaaatttcgaagctacatcaacttctgcttcaaacttggattctttttttgctttttgagcaccatcagctttagcttctttaatagatttactacgttcttcgtaacaatagtggttttctttagtcatcttttttcatattcctctctgatttatctttataatttttccttaatgaaattttcaagacatttgttggaacaaaagtttaaattgtcatacttgttatctttattttcataagcaggcaccttaaagctggcatccagaatcaaagtcccacaataatcgcaaataccaaccatttaatcacccgccttttcagctatttgccttaaagcactttttgaggacgtataatagttttttatctaatttagtataaatatactcaatagcaatttaagtgtcttatataccccattttgacgtttttaggaccatctaattgtaaaagtcgctctcactcttttggatcaaattgagccaaattcttcagcatttcttttaaatcagataaatcagattctgactcaggtttcttaactctttcttccgctcgttttttatttcttgcagtccaatctgtcccctgttcaacacgtttaccacgaccgtatctgtacttagtagtccttgagtgctgtttctttagctctttaagtgcagcaattagatagttaatagcatcaactttgatctttgtgtcgcacataagagtaactaactcgtcaagagtttctggattagtttctttgattaacttagttaactgctcaatttgagctttgaaggttgctcctgaataagctaaaggcaaacctgcttttttaaattgactgatgattttactcgcgcgtgcgcgcgcgtcttcttcatcatctatcagtaatttgttatctaagtaattagtagtattagtatttagtagcttgcgattatccaatataggcttatccaatataggcttatccaatattggataatcgaatataggtgaatcatccagtatccatacggattctcctaaggttccagtcttagaatcacgttctcttgagatactcaaatatttatatttctgtaattcttttagacctgctctcaaagaagccagtccatctggagaatgtttagctatttctgcttgatgaaaagtccaatcttctggtagcgacattaaatacgcaaagatacctcgtgccttccatgacagccgttcatctctaattacagaatttgaaagtattgtgtagctatgttttttctttcgtataactgccatattataaccccgcttttattttttcattattcatttatattcttttaaatttaaagagtcgatactccatacccaaatttcattttgtaaacaaatcattcgaggatcgtgtgacgttttacgtgttaaaacaactgataaatcaaagaaattattatatgcaatagttttaaccgttgatagtacacttgcattattaaaaaaagaaatctgatgctcaattttaaaaccatagcttttagcaatttcttctgtaagagtagccaactgttgaagctcactaattgaaagttggttaagaatcacttttctctttgaagaaagctcaatttcggttaaaagataggctagctcatcagatactgatgtgtatgcatttaaaaaatcagtttttttattcatcttttcctccatcaactaaagctcgtgtttccattatcttgttaaaaactaaacgagcataatgtacttccctattcgtcatgctataaagatcttcggcatttactgcaattaaaattgtatttattatcgcttgataatctttctcaaaatctctattttcatttctcaaaagatagttgaaaatatcttgtctcaatttttctcttgaacttgtttccattttttacccctcttttccatgaagctaatcaaagtatctcttgagtagcgtttgagcccatctatcattaggaattcaatatcataccttttagtccaactccaaaaagttgatggcgatactcctaaaaactccgctgcttgcttcccattaaaatattgttgtcttcccactttttccaaaacctttagctctgttttagaaagctcagtttgatttttataatatttctttagcaacaaatctagttcaggcaaattactaatacttaatttaatggcaaaattatcttctccataaatcataaaaactccctcacattccatctttttgttcttttttatgaacgtcatgagtaaaaaaaatattgatttcattatcaggtattttcaatatctccaatatttttacaaattgatctatagaaattggttttttaccgttttctttctgattataggttacataactgactcctaaggctcttgcaaatttttgttgtgaatatcctcttgcaattcgctcagcttttagtcgagctaaattaaagtccgacattttttctctcctttcgttcttcatcgtgaacaactacactatacagcatgtgttcttttttgtaaacattttttgaaaaagaatttgtttttgtttataaaatgttcatttatataaacaaaagtgtattatataatataagtaaatgattttgaaaattgtgaggataattatgagaaatagtaaagaagttatagcgtatatcaatgaattaagaaaacagcaaaaaatgtctatatcagaactttcagaaaaagttggtatggcaaaatcaggtgtttccctttattttaatgggaagcgtgaatttcctattaatcatgcagagaaatttgcaaaagctcttcatactaatgtatttgaccttttaggtgttggagatgattctatgatcaaagttccagttttaggagaaattgcttgtgggcaaccaattctagctgaacagaatattgaaggatacagatatattaattgcagagatcaaagttcaaacttattttttctaaaagctaaaggtgattcaatggtaccaaccatacctgaaaactcatatgttttaattgatagaaatgaatcggtagaagataacgatattgttgcagttcttattgataattcagccacattaaagcgataccataaaaacggaaatactgtaactttaactggagataatccaaatttcccaccaattgttttgacatctactgaagatgcaattgcgcaaattttaggaaaggcaatacaagtaagctttgatttaaattaagagaaataatagtaaagtgaggagtatttatgcctaagcaagataaacgaattgaaaaatatgaaacaaagaaaggtgtcagatatcgctttaaaacttatttaggaactgatgaaactggaaaagcaataaaaatcacacgatcagggtttctaaattataaagaagctaaagagtcttttgatttattaagagcaaagggcttaaacgaatatgtaaaggctaagcaaataaaactagacgatttatttcaaatttggtttgacacttataaactacaggtaaaagaatcaactgcagaaaaaactaggcaagtatatattaatcatttacataaatattatggcaatacttatgttgacaaaatccagcaagctagcctacaaaagtttgtaagtacattaccaaaagaactggtaaactttcgtgatgttacaagtcttttgaacaggatatttaaattagcaataagtttgaattatatatctaataatccattaaaaaatgttataatcccgaaaaaaacagctagaaaaagacgtgatacgacacaaaatttttatgataaaaatgaattgaaaagctttttgaatgctgctcaatcaaccaattataaatactacgtttattttttgttattagcttcaactgggataagaaaaggagaagcacttgcattaacgtggaaggatataaatttttctagtaactatataaacataaacaaaactttagcatatggcttacatggtaaatacgtggtgcagccaccaaaaaccgcacactccaagcgcaaggttcctttatctaaaaatttaaaatcagaattattaaactatcaaaagcaagatactaaaaataaatatttatttcatactgaaaatggtgattatctaagattaactaaacctcaacagtggttaaaaataatttatagaaaaaatcctgaattgaaaaaaataacaattcatggatttagacatacttttgcttcaatccttatagagtctaatccaagtattaagccgactgatgtacaagcaatcctagggcatgaaactgttcaaatgacattaaatatatatactcatgcaacccaaaaaggaaaagaaaaagtattgaaacaaataaatgatttagatatttgattttatttttttattgttttttacgtagcttttacgtgaatataaataaaaagtgctgatattccttagaacatcagcactataagtagtctatacggagtgtgagggatttgaaccctcgatacaggttaaagcccgtatacatgatttccaatcatgctccttcagccactcggacaacactccattactccggttgccagattcgaactgacgacatcttgattaacagtcaagcgctctaccaactgagctaaaccggattattaaaaaagagcgcggcggctacctaccctcgcaggcagtttcccaccaactactctcggcgtgaagaagcttaacttctgtgttcggcatgggtacaggtgtatccttcttgctatcgccaccgcactctcttttgagcttactcgctcaaaactgaatttcaaccaacaaaaaaccttcgctttggtcaagttctcgactgattagtactggtccgctccatagatcactctacttctactcccagcctatctacctcatagtctctgaggtgtcttattgctttcgcaaaggaaatctcatctcgaggggggcttcgcacttagatgctttcagcgcttatcccgtccatacatagctacccagcgatgcccttggcagaacaactggtacaccagcggtatgtccatcccggtcctctcgtactaaggacagctcctctcaaatttcctacgcccacgacggatagggaccgaactgtctcacgacgttctgaacccagctcgcgtgccgctttaatgggcgaacagcccaacccttgggaccgacttcagccccaggatgcgacgagccgacatcgaggtgccaaacctccccgtcgatgtgaactcttgggggagataagcctgttatccccagggtagcttttatccgttgagtgatggcccttccatacggtaccaccagatcactaagcccgactttcgtccctgctcgacttgtaggtctcgcagtcaagctcccttatacctttacactctgcgaatgatttccaaccattctgagggaacctttgggcgcctccgttacactttaggaggcgaccgccccagtcaaactgcccacctgacactgtccctgaccacgcttagcggcctaggttagagcatccatcaaacaagggtagtatcccaacagcgcctccagtaagactagcgtcctactttctctggctcctacctatcctgtacatgtttaacagatactcaatatcaagctacagtaaagctccatggggtctttccgtcctgtcgcgggtaacccgcatcttcacgggtattataatttcaccgagtctctcgttgagacagtgcccaaatcattacacctttcgtgcaggtcggaacttacccgacaaggaatttcgctaccttaggaccgttatagttacggccgccgtttactggggcttcaattcaaaccttcgcttgcgctaagctctcctcttaaccttccagcaccgggcaggtgtcagcacctatacgtcatcttacgattttgcagatacctgtgtttttgataaacagttgtttgggcctattcactgcggctgatccggagatcagcaccccttctcccgaagttacggggtcattttgccgagttccttaacgagagttctctcgctcacctgaggattctctcctcgactacctgtgtcggtttgcggtacgggtaatatctctctggctagaagcttttctcggcagtgtgacatcatgaccttcgctactttatttcgctccgcatcacgcctcagccttttagaagcaagcatttgactcacttcaagccttgacgcttacacatgattccagttacatgcgccattagcctactgcgtccctccattgctcttaacgattaatattagtacaggaatctcaacctgttgtccatcggctacgcctctcggccttaccttaggtcccgacttaccctgggcggacgagcctgccccaggaaaccttagtctttcggcggataggattctcacctatctttcgctactcataccggcattctcacttctaatcgctccacctatcctctcgattaggcttcgccgcaattagaacgctctcctaccacgtgcttacgcacatccacagtttcggtactatgcttagccccggtaaattttcggcgcagcgccactcgactagtgagctattacgcactctttgaatgatggctgcttctaagccaacgtcctagttgtctacgcaactccacatccttttccacttagcatagatttggggaccttaactggtgatctgggctgtttccctttcgactacggatcttatcactcgcagtctgactcccgcgtatagatatatggaattcggagtttatctggattcagtaacccctgacgggcccctagtccaaacagtgctctacctccattatcctctctcgcgaggctagccctaaagctatttcggagagaaccagctatctccaagttcgtttggaatttcaccgctacccacacctcatccccgcaatttttaacttacgtgggttcggtcctccagccagttttacctagccttcaacctggacatgggtaggtcacttggtttcgggtctacgtcaagtaactgctcgccctattcagactcgctttcgcttcggctccgacttttctgtcttaacctcgctacttaacgtaactcgccggttcattctacaaaaggcacgccattacactttaatgtgctttgactacttgtaggcacacggtttcaggttctctttcactccccttccggggttcttttcacctttccctcacggtactggttcactatcggtcactagttagtatttagccttgcgagatggtcctcgctgcttcaaccgggattcctcgtgtcccggcctactcaggatactactagagcttcgagctatttcgcttacggggctctcaccctctctggcgtcttttcccaaagacttcaactatacctctctgtctcacatcgtagtcctacaaccccactgaataaattcaatggtttgggctctttccctttcgctcgccgctacttaggaaatcgatttttctttctcttcctgcagctacttagatgtttcagttcactgcgtcttcctttaaataccttaacagtatttaatgatgcatcgctgcaccgggttcccccattcggatatctacgggtcttagcttacttacagctctccgtagcctttcgtggttcgtcacgtccttcatcggcttctagtgcccaggcattcaccgtgcgcccttctcttcttgacctattacctagatctctcttctcggttcgctttcacaatctgttcaatgattgtctcggtttttcttggttgttattcagttttcaacgtgcaattctcatggacaccttatggtgtccgatggaggctaacgggatcgaaccgatgacctcctgcgtgcaaagcaggcgctctcccatctgagctaagcccccaattattcgtcttttcccttgaagcttttgcttcaatgggcctaaatggacttgaaccatcgacctcacgcttatcaggcgtgcgctctaaccagctgagctataggcccgactttttgcttggtttttattcaagttcttgagagttactactctcaaaactaaacaaagtttctttagtgtgcttccgtactcagtgccttcttttagtatctctactctccagcaccttgcttccttagaaaggaggtgatccagccgcaggttctcctacggctaccttgttacgacttcaccctaatcatctgtcccaccttaggcggctggctccaaaggttacctcaccgactttgggtgttacaaactctcatggtgtgacgggcggtgtgtacaaggcccgggaacgtattcaccgcggcgtgctgatccgcgattactagcgattccagcttcgtgtaggcgagttgcagcctacagtccgaactgagaacagctttaagagattcgcttgccttcacaggttcgcttctcgttgtactgcccattgtagcacgtgtgtagcccaggtcataaggggcatgatgacttgacgtcatccccaccttcctccggtttgtcaccggcagtctcaatagagtgcccaacttaatgctggcaactattaacaagggttgcgctcgttgcgggacttaacccaacatctcacgacacgagctgacgacagccatgcaccacctgtctctttgtccccgaagggaaaacctaatctcttaggtggtcaaaggatgtcaagacctggtaaggttcttcgcgttgcttcgaattaaaccacatgctccaccgcttgtgcgggcccccgtcaattcctttgagtttcaaccttgcggtcgtactccccaggcggagtgcttaatgcgttagctgcagcactgagaggcggaaacctcccaacacttagcactcatcgtttacggcatggactaccagggtatctaatcctgttcgctacccatgctttcgagcctcagcgtcagttacagaccagagagccgccttcgccactggtgttcttccatatatctacgcattccaccgctacacatggagttccactctcctcttctgcactcaagattgacagtttctgatgcagttcttcggttgagccgaaggctttcacatcagacttatcaatccgcctgcgctcgctttacgcccaataaatccggacaacgcttgccacctacgtattaccgcggctgctggcacgtagttagccgtgactttctggttgattaccgtcaaataaaggccagttactacctctatccttcttcaccaacaacagagctttacgatccgaaaaccttcttcactcacgcggcgttgctccatcagactttcgtccattgtggaagattccctactgctgcctcccgtaggagtttgggccgtgtctcagtcccaatgtggccgatcagtctctcaactcggctatgcatcatcgccttggtaagccgttaccttaccaactagctaatgcatcgcaggtccatcctttagcgacagcttacgccgccttttaaacttctttcatgcgaaagtagcttttatccggtattagcatctgtttccaaatggtatcccagacttaagggcaggttacccacgcgttactcacccatccgccgctagcttgtatctatgtccattccgaagaatttctataggcaagctcgctcgacttgcatgtattaggcacgccgccagcgttcgtcctgagccaggatcaaactctcattttgaattaaaatgagctcttagctcaatcagattttttgatttgttatctcaaatttattgcttaacgaattgacttcgcttttgtttgggttgttacacccgcacactttagcgaaactttgttcagttttcaaagtactaactccggccactcaagtgacctttgttattatatcagaagcaagttgcttttgtcaagaactttttttctgatacttggtaatttatttatcctcgctcgtcatctctgactcacgacaatttaatatattaccatctcttaacctttcggtcaagaacttttttgtttttatttttgctcttttgagtgttttctttaacctctcgcgagaacagatactactatacaggctttcctccttttcgtcaaactttccttttcgttcgatttatttcccttcttttctgaacacctggttacgttgtcaacttctcttcttttttatttctcttcttttgtgaactttatcttttattacttaataatagttccttttttatgacttttctgttgcgaatcgactaaaaactttttttattttttctgaaaagagtaaaaaaagagaagctaaatagcctctctttctctaattatcagaattaacctaaagtatcttctttagtaatcttagtcataccatgcatatatggaaccaatacttctggtacagttacactaccatcttcgttttggtagttttcaagaatggcagcaacagttctaccaactgctaagcctgaaccgttcaatgtgtgaacaagcttaactttaccatcttcatcacgatatctaatttgtgcacgacgtgcttggaaatcagtacagttagaacaacttgaaatttcacgatacttgttttgtgcaggcatccaaacttcaaggtcataagtcttagcactagtaaaacttgcatccccagttgataatgcaacaacgtgatatggtaagcctagcttttgaagcaagtgttcagcattatgagtcaaacgatcaagttcgttccatgattcttctggcttacataccttaaccatttctaccttgttaaattggtgcattctaattaaaccacgagtatctctacctgcactacctgcttcacttctaaatgctggagttaaagcagtcacattaataggaagttttttaccatcaacaatatcacctctaaagtagttaacaagtggtacttctgcagttggaattaaagttaagtttaatggcttatcaggatcatcgttatctacgatagtatatacatcttcagtaaatttagggaattgtccagttccttgcattgaatcgtcatttacaagataaggtggaataacttcagtataaccttctttagtattttcatctaagaagaagttgtatactgctctttcaagtaaagcacctgcacccttgtagtaaacaaaacgagcacctgaaactttagcagcagtatcaaagtctaagatatgtaaatcatcacctaaatcccagtgagccttaggttcaaagttaaacttagttggttcattccattttcttacttcttgattgtagctttcatctggaccaattgggtcagaatcatctgggaaattaggtaaacgaagtaagatgtagttttgcttttcagtaagttctgcaacttcttcatcaagcttcttaatttgttcacctacttcacgcattgccttgattgcgtcatcagcgttttctttattgcgctttttggcagcaatttcttttgaaacttcgttacgctttgcctttaatgcttcagtttcacttaacttagcacgacgcttttcatcaatagctacaacttcatctaattcttcaggcttaatgccccttgtagccaatttttcttttgcccaatcaaggcgttcacgaataaccttaatatctaacataaaaaacctccgaaaaataaaaaagccgacccgtcccatcactgggacgaatcggatcacggttcgcggtaccacccaagttcagcctaaactaggccacactcattactttgcgataacggcgcaaaccgtgcaactattaattgcccactttaagaaatctggaaacgacgttcatccgctcacaccaaccgcggactctctgaagctgtcttaggatttcgcgtttacctaaattttaacatgaaagcgtaaatttgcaattatctgagcgtaaaagataataattttcttttttagtttcagatgaaaacaaattaggataacttacttgatatatatactcaaatcctatcttctttaacaactgaattgaagcatcattatcttgaaaaacccctgcccatatttctttcatcccgatcttattaaaggcataatcgcagaccagctccaaagcctctttcattaatccctgatgccaatatttttcatcaagtaaaaaaccaacttcacaggtatttaataaactaggactggcacctcgttcatacaattcaaccattccaataagtttgctattttctaaactacatattgcaaagctattttttctttcagctagtaaagttgctccacgccttgctgctgttaaatccttatattgcgtaaaacgtgctttttcaaaatagacgggattcttactccataaaaaaagttgttctccatcttcttttataaaacgtcgtaaataaattttctttcctatcactttttaaaaataccaaataaccatttagccccgtataataatccaaaactatacgcagcaattgtccatggcttccctaaaataataatccaaaaataagtccaaaatttcatttgagttaatcccgctagcatgcacaaaacatcatcaggtgcagcaggggctacaatacaaagagcgaaaaaccaattaaattttttctgattttttgtccacttaatatacttgtctaatgtttcttcagaaactaaatgcaaaataaatggctttccatatcttcttgataaataaaaaataataaatgaaccaagacatattccaacataattgtagacaaatccccaaattggtccaaaaaatactactccagctaaaagagaaactcctccaggaattattggtatcactacttgaacaatttgaattaatacaaatagcaaggggccaacaattttcttatcagctaagtatgccttcattttattgggattagtaaaaatccctaatttccaccaataaataactaaagcaatgattacaataaaagatattaatgttaagacattaatcaattttcgacttttttcagcagataattgcattttttccgcctttctatcctacctaaaatattttatcaaatgtaaatcaataaactaaaacaatttaaaaatacactattttcttatcaaaattaaagtatttgttatttttttaagataccaattgtttttattggctttttatatgctttttttactataatagcctcgaaaccgcaaaagaaaggaatggattgatggtagtcattaagcaaaatgtcatatatgactctgaacatgatttaagaactgatatctattttcctaatgatactagctcaaaaactaaaatattagttttttggcatggtggtggatttattcgaggaactaaagatgattgcaaaaatttgggcattaaatttgctaatgcaggatttatgacccttattcctgattacagacttgcccctcgaaatatatttcccgctgctcaccaagatgcaagaaattttatcgattggttattaaactcaagttatactgactcagatgatcagaaaaatgtagtacaaattggagcaagcgccggtggcactttagctttacaacttgctggtttttacggtttcccaacagttacttggtctgcaccagtcgatttttataattggatgaaaaagcataaaaaagttttgccatccccagatgctagaacagaattaggaataagtgatcctgatgaaatagctgcttcattttataaatactttactgtaacttacattggaagtaacaattatgaagctttacaagagttagatgctgattcatatgattatcataaccttaatcagttaatgttaatcaattctagtcatgaattagttgaactcagtggtgtttttaactttatccactttttagctaattcaggacatgaaatacagcttcttactttacctggctcaggtcatgctatggcctatgcaaatgactatatagatgaatcgctagattttctctatcaagccataaaaaggaataagtagaatgttgaatatagataagtttgtacaaattagaaagtctctgaaactatctcagacagagctatgttcgggtatttgtactcagtccactttaagtaagtttgaaaataatggtttagttccatcatttaagattttgaatcaattatgtgaaagaatgaatatttctctttcagatttaatgggaccatcagatgaaacgggagttacagagcaattaatagaagcagatttttcactagtttcatatgactatgaaaaacttgcaaaaattatggccaagattaagcaaaacactttaaaaaagagtgatgataagtttcattatcaatacttaaaaggccaagttgctctttatgaaaaaaatgagccaatgagtgctctttattatttcaacggtattttaactgcagctgaattaaaaacagatagtatttatcgattattggctttaaatggttgcagtgaagtatacttcagtcaaaaagaattcgataaagcgaaacattactatgatcaaataaaaaatgaagttttaaaatttaaagtcaatagtaatgaagaagcaattcaagttctttctatcttgtgcactgctggagaattttatggtgaacaaggtgactataagcattccgacaaattattaaatgctgcatatgacttatgtgcaactcgtcacctagtatttttcttagctagaacttgtctgcgtttagggcaaaatattattgcacaaaatggtgatacccaaaaagcaaaagaaagattttatgatgctattgcttttggtcgacttaatgataatcgacaagtaattgaatatgcacaaagtgccttaaaaagtttataaaaaaggagtctggatttttccaggctctttttcattaaaaaatacgatatccagtaactgggttactcatacatgagttaaagtcatatgtttttagcttttcaaattctgtatttccatcaattaaagttgttacaccttgggcaagcattaagttcattttcttaactttatcaggattttctgtaaatgggactaaaataactggcttgtgcattgcacgcatatagccaatttcaaaagcacttccatcatcaatattatccatatcatataaaaagacacctacattagcatttactaagccagtaatgtcgttttgataagtagcaagttgccattttaaacttggaatacctgctttaggatttggttcttcaggatcaacaaattcataatcaaatggaaaatgaaccctaacaacagttggattttctgctagatattcttgagctaatttcactctctttttttgtgcatcattataaaatggtgttcctaaatacacattgccagttgaaattacagtcattatttttcccctttttcattttttatatcaatattttagcaaagaaattttttaaataaaaaaattaactctctcttgaaaacgttttataataaaaattatagtctttttaaaaagaggtatttacatgtcaaattatcaatccattaatccatatacaaatgaagttttcgcagaatattctaatccaagtagccaacatatcgaacaaagtatcaacttagccaattgcttatacaaaaagtggcggcatgagagtcctaaatcaagaagcaaaattttaaataaaattgccgataatttcgaaaataaccgaactcaaatggcaacaattatgacaaaagagatgggaaaactttatgttgaagcattagacgaagttgatttatgtatcaatatttgtcgatactttgcccaatatggtcctgatatgctaacttcagtcccattaaactcttctttaggtaattcgtactatctcaaacaatcaataggggttattatggcatgtgaaccttggaactttcctctttatcaaattatacgtgtcttcgctcctaattttatcgttggtaatcctatgatcttaaagcatgcccataatgttccaggatgtgccgctttagcagagaaaattattaaacgagctggcgctcctgaaggtagtatgatgaatctatacttatcatataagcaattagctgatgtaatcagtgataagcgaattaaaggggttgcattaactggctctgaacgaggcggtgccagtgttgctatgcaagctggtaaatatctaaaaaaatcaactatggaattaggtggtaatgatcctttcatcattttgaatgatgcagatgatgctctactcaaaaaagtattaaaagatgcgcgtacttataattgtggtcaagtatgtacttcttctaaaagaattattgttttagaagataaatatgatcaagttcttaatgaattaaagaacattttctccaatttaaaacctggcaatccgatggattccagcactacattagctcctttaaattcagaaaatgctaaaaagaagttaactaaccaggttaatgaagcttgtgaagctggcgctactattttttatcaatatcctgagattaatgaaaaaggtgctttctttagaccgataattctaaccaacatcagcaaagtaaatccagtttttgaccaagaattattcggtcctgttgcttgcgtatacaaagtaaaagatataaacgaagctattgaactagctaacgattccagctttggccttggttcttctattattagttctgatattaataaagctcaagaaatcgctagtcaaatcgaaactggaatgacagttattaatggacgctggataactgcccctgaactgccctttggtggtgtcaagaattcaggctatggtcgtgaattaagcgaacttggacttaacgcatttattaatgaacatttggtaattgattgtactaagataaataaataaactgtactaaaataccctcctaaaaaattaggaaggtatttttttatatatcttttttatctttaatgagatttatcaatgtcaacacagtagttaatacactagtaaaaattaataaataataattaacggcaatagctgttaatgtagatattaattgcttagttaaactaccaaaagttgaaatagctgtagtcctagaagaataaattattaaccccaataataaaattgtctcaactaaggcaaaaacaaaagctcttacagtttgacttttcaataatcgataaataatgaggaacggtgtaattactatataaacccaaccaatatagactagtaccgcaaaaatagtttgagatgatgaaaattgattattagcaaaagtaagaattgtcctagataatgagttggtattctcagattttgaaaagaaaataaataagctaatcaaagaagttaatattgctccccaacgataaacactagcacttttaggtaatctaaattgttttacttttctaactttttcttccacttcaggatgctcattaattattcgttctctttgcctatccgctctttctccaaaccgttctccagttttattaaggtcagcagttagctgtttatcaacagtatattgcttaacaggagtatctctcttacatacccagaacagccaacctaaaagcaacaataagcatgtccatcctaattcaggaacaatactagtaaagaccattaaaattaatccagttacaaaaacaattgttgagttcttatgaatccataaaagcatcttttgaaaaatttcttttaatggcagcttacttactgtattcatcaagtttgttgagttttccttttgaatttggcttctactcatcccttgtttaacttttgtaaactctgccttattttgctcagcttcttttgaaaatgtatagccacaatatgtacagacggattcgtcaatttttaacaagtgaccacaatttggacatcttttcattaattaaaacctctaaaaattttatttactaattaccattataatttttaaatttattttgcatagaaaaaaagactgtattatacagtctttttttctttctaaatttaatgcttagacttcttgaatccttcataggctaattttacagctgcagacaaaagaattggcatcaaaattactaaaatagctaaaccgacaattactgttattgcaacttcaattaaagttggaatacctgatggaataagtgccgcaaaggttccacccaaaattatagctgcactaattacaaccgtaccaataattgcacttgcatgaaccattctttcacttgcagttgtttcatctaattcacgatatctcatcatcaagaaaatagaataatcaacacctaaggcaataatcataataaagctaaagaatggagtattccaagtaagcatatccttacccataaaagccttgataaaccattcattaatagttaatgaactgaagtaagcaattaataaagtaccaagaatgaatactggttggagtattgatctagtcaccacaattaaggctaagccaattccaactaacattattattgctgttctagtaaagtctttagaagctgtttgacgagtatcttcaattcgtgaactttgtcctcccattaccacttctgcatcctttaaatcagttccagcaagtgatttcttaaccatagcactaagtttatgtgacttaaccgcagctttgtcagaacttggatttgaatcaagaaccacaataatcttagtcattttcttatcattgctcatgtagttattaattgatttttggaataatgagctctttaaatacttccttgggatataaaattcatcactagctgcagaatttgcaagacctgataagtatgtagttccttcacccaagccagaatttactttattaattccatcagtaagcactggtgaattactataaagtttttgagctccattagtaatttgtgaactaccagtagaagcacttgatacagcactctgaacttgatttaagcctgaagataacttagtaatagcttgattagcacctggtaaagcaaggtttgatgctgttgctaatttattaacttcagtttgaagagtgctaatttggctactcaaaccagataagccttgaagagttgtagcaacattggataagttatttcctaagctttgatcagctaaacctgccgcttgcaagtttgcagctactttttctaatgatgtagttgctgcactagtctgcgcttgaactttactgttaactcctgacaaaatagtcattaaagcttgttccatagcttgtttttgttggtcattcaaacctgctttagcttctacagcacgatactgagctaaaatttgactagtatcagttgaagttgaacttgttgaggcttgaagctgtttaagaatttcacctgcagtagttaaattggtcccaattaatttagcattattacctgcatcagttaaattgttagttaaactagttgtatcaattgaagcacctgaactacgtaaggctgaatttaattcttggataccttgattgatttgaggtaaagccgattgtaattgacttaactgactttgattagctgttgataattggctattaagttggttagccattgtgtttaagccattagttaaagtttgagaaccagatactaattgtcctaaaccattagtcatttgacttgaaccattacttaatttagtcaagccactttgtgctgaacctacaccttgagttacagtattaagttgcttatttacatagagctgattaactttttcaccataaggttgcgttacagaagtaactaaacttactcctttacttgcttgcagttgacgtgtagcttcatcaattaattttaagtctttttcattatctaaagtatgctttgactttatataaagatatgatggcattgccatccctttagaaaagtgtttttgaactaccaataatccagcttttgaaggtgtatcattactaatttcatctgtatcatcataattaagatgaccactataaagtgccataaatggtgtaacaattaagaatgttacgatgatatgcaaaattggtctttttactgaattagaagcaaggaaagtccaaatcttactttcactttcaccttcaaactttttaactggccaaaacatcttggcacctaaactcatcataaagaatggatttaaggttagtaagacaagtaacagtactgcaacaccaactgcaacaccagtagctgattgataaattgaaaacttagctaaagctagtgctgaaaagccaattaatatagaagagcctgaaaacaggatagtttttcctgctttatgcaaggcatctttagttgcttcaccaactgctaaaccattacctaaattctctttaaacttatcatataaaagaatattgtaatcagtaccaattccgaataacacaattaccataaaaacttgggtaaagttggaaaatgggaagttagcattttttactaaattcgttacaattgaaaaagctgttaagaaagatactcccactgtaaataaagaaatcaatgggacaattggggatctgaaaactaaaactaaaacaataaaaataaaaattatcgatattaattctgttttcttaattccttcttgaatagatgcagaaaagtcatcgtttaaaatatctgcaccagttacataagttgcgacaccttgagttttaatagctttttgcaactctttattaatatctgaaatagttccatgtgattttgaaacatttaactgaacaagccaagtcgttttatcattagactttaaacgcttcttagttgcaacattatcattaggagctaagatattttttattccgtatttgtctttattttcttttaaatcagaaattgtctgattaattgctgattgattagttttagttaactttccatcttttttattaaaaactaacgcaatctcatatgtattcttagttttattactccattcattattgaaagtttgagcaatagtagtttgtgtatctgcaggtaattttatttcagcgtgatcacgggttagctgattaacattgggtaatgcaacaatagatataactaaaatcagcaaccaggcaatcaatgaaaatacatgattttttataaacttttgcattgttttcccccttctaaaccgtttctattaaacgcaatatcatttgatgataattagaatttctttcttctttactttctccgctaaatatagctgaacggtcaaagaagacataccctaaaactgcaccaactaaagcatgaactgatatcggttcatcttcatcagattttagtttagttcctagctcaataacttttaaaagctcaatattgatctctgcatcacgttcatattcatttaaatgatataaaattgcagccaacgcactatcttctagtaaatagtcacgaatcaaatcacaaaacttcaatattgcttcttgacctgacatacctactagattttccttcaagttttcattcaaagccttaattcgattagcaccgacaagtgataacagttgcgtacgattatcaatataatgatataaagactgagaacgaatccctaattttttagcaaggttaggaaatgtaacagctgctatcccctgcttatctattaactcgctagtagcagctaatactttagataaatctaacgtccttttcttaaccaatattttcacctccaattatcaacaaaaaataatataccacgatacaatgtagatttctttctacactttgtagattagtgttacaaaaaaagacttagctaatgccaagtcttaattttgattaaaccaattactaattgaaaatcctaattccgcgaaagaactattgtcttttgaagtaaccgcaataatataactatgtttacttgtatttactaaagcaactgctgatttattatcacctatttgaattatagttgcattatttattttacttactagtggactttttacagaaaaagttgaaagtccagttaatactgtattactataattagctaaaaatttaccattatataaacttttcattaacgtggccaagtcttgagtagtcgtagatcctacaacactttcaccaaatttattagaaattatagtttcattagcgcccatttctttaacaatattattgacacgctccttgccaattttattaagtaataaattagctgctgtgttactatttttgctcattaaattttgtcgcacatacgttaagctataaactgtattagctgtaaaactactgtcccctttaacaatttcattttcagtaggagtaagagtatctgttgctttaattttttgttgctctatttctttatataaaccaattaacaaaaaagcctttaaactatcactaacatctactttatttttctcactatagacttcagcagagttattactattctttagatcaattaccttaacatcataattgtctgaagttttcatagccttttcaatttgtgccgatagcttagaattacctttcttagttatcgtagctaaatttaggctagctccattttccttactttttttatctttttctacaacagactgactattattttgatttctcgaaatagttaaagttgctgattcatatttttttatattgttcaaatacaatgcaaatgaacatacagatgctactatagcccctaaaataatcctatttttcataatctctccctctacctaggataattttagccaaaattggatctacttatcaatatacattaatattttttagaaagttcttattttcataaaccaggaaagcgttttattgtataattaatctgatacaaataggaaggataattaaacagtgtattatcaaattggaattgatgcaggcggaactcatacaaccgcgattgcatatgacctaacaggtcaagaattactaagagtagaaacaggtcaaggaaatattaatgcagattttgacggaggaatggctaatattaaagaagctgttcgtcaaatccaagctaagttaggttcaaattgtgaacgtatcttggctggtattgctggaatttcagtaacaggccaatataaagaagtttctgagactttagcttcagcatttaacactaaggcaaaagctataactgattcacttttagctttatacgaaggacttgaaggcgaagatggtattattgtcattgctggtactggttcagttgttaatggcttacaaaatgggaaaatattaacagttggtggatatggacacttattaggtgatgaaggtagtggttatgctataagtattgctggattaaagtcagcacttcattcttgggataaacgtgaaaagaatgacttaattgacttattcactaaacactttgaagtttctgaaatgaacgactgtaatcaaaaagtatatcgtctcgaaaggccagaaattgcgggtttagctagattaattgctgaactagctgataacggatctgaagatgctcaaaacgtgatttttagccaagctgatttattggctgatgatattattatgggacttgaccgttttgctgatccgaaaccaatggcaatcgcattaactggttcggtattgaccaacaataagatgcttcgcacacgtgtagaagataaagttcatgctaaatatcctaatgccaaatttgttatttcttcaggtagcaatgcaagtggtattttattcgataagaatgacgattactacaccgcataataaaatataaaaaagagcctagtagcttgctaggctcttttaatttaaaagaaatgatgtcgcttcatataataagctagccatgccataattcctatagtaattatagaaatcataatccagtcaaagctatggccaaatactggcaggctaacattcattccataaaacccggtcataatagtcggaattgttaaaagaattgaccaaactgtcaagaatttcatagtatcattcaagttattattcatcatattgttactagtagttgagagagtctttgtaacttgactagaaattcgcaccatttgatctgactgatttgattcaatcaaaacatcatctaatcgttcaagtgaacgcttagtgaatttactattcaaatgtgatttatttaaactatgtaacatgaggaggtcagtttgaatactacttgaaagatacactaaccctttttcaatgttagaaagttcaactaaatccttattattaacataatctgatagtttactatcaagaccattacgttcaatatgcaattgagttacagctctttggaagtattgagatgaatataataaaaaaatcatcaaaagctctgttacatcttcagcttctgatagcttctcacgcatcctttcatcatcaaattcttcaaaaacataattagtcaattcagtatgaaaagtaaaaatattatttccttgaactaaaaaggtaaccggattagctgtaaagtgcttaatactaggtgttggccatataggcacgtcataaactaataagtgactttgggtatattgatcatagtcatagtgaggacgttcatgtcggtcagatatatatgaaattatatctgatgtaaagttaaaatctttttgtaaaattcgactgtcctcttcactaagattgctaatgtcataccagttgtaaattgttttaactggaaaagtttgttcttttatcatgccatcacctcactagaagtactttattatgttaacatgtttcgcttaagatgaaaaatcaatgtttcttaatgataaaaaagaagtagattaatctacttctttttaaagataagcaattattgcttccaagcattttctagttttgcttgtccttgcttaattaagttattatagttttgctttttacctgcagcaattaatatattttctaaattactaccagcttgaacatatgcagcgtttgagttcttttctactggaacagagtacaaacgtttcattgcatccttcaaaattgctggggtcttcatatttgggttattaatatatttcttatctactaaaacttgcttgtttactggaacataaccagttgcatttgcccaagttaattgacttgatttagatactaagaatttcatgtacttaaatgcggctgccttttgcattgcacttgccttattaaacatgtaaatgtccgtaccttgttgcatgttgtacttagatggacgagcagctacaccatatttgaattttccattgattgcctttttcacaaagccttctcctgcactagtcccaatgtacattgcaaccttttcattggcaagaggacctgataagtagtgttcactgccagcagttctgaagtatccttctttaataccttctgcatagtaattaattactttcttagatgctttactatcgaatttaactttactactaaaatcaattccttgatcttttaggcctaaaagataataattactcataacgtcaaagccagcaccaacaactttgtgatgactcttttcgtatatttttttggatgctgctttaagttcagccattgttttcggaacttttacattgtattttttcaacatatctgcattataagttaatgcttcaacggatttattaaacggaataccatattgcacaccattaatcttggcaccatttaataaactggcattaatatcactgtcttttccgttccagccaacattcttatcagcaatataaggttttaagtcaactaacattttatttttagcagcactgtaaagccagcctggataactttgagtaatagttggcaagttatttggtgattgcattgttgaatttaacttagcttgtaaattgatatatgatccttgatattcaagcttaatcttaatattaggattctttttttcgaattcatcagttaatttctttaatgtagcaccttgtactccactcattccatgccaaaaaactacagttgtttttttagttactttagggatattactctcttgttttactgaagcctgtttctgtgtcgaacatgctgtagttaacaaagatactccaaccaatgatgataaaagtgcttttttccaaatattcatatctaattcctccaaaattgattttgaatttttcgaaaagtccatataccatcttacgctacatattgatatattcaaccttgaatttcaatatatagtatgatattagaaaaaaagaagtggaaattttccacttctttttcaatataaaatttagtttattgcttccatgcagcatcaaattttgctttgccagctgttatttgtgaatttacactttgtttcttagctgcagcagaaaggatgttttgcattattgaatttaattggctgtatgcagcgtttgaattcttttctactggaactgagtataagttcttcattgacttagcaataattgctggggtcttcattgacttgttgtctttatattcgcttgagtttactgctgcagtatttactggaacatagccagttgcattggcccaagttaattgacttgatttagatactaagaatttcatgtacttaaatgctgctgctttttgcattgcacttgctttgctaaacatgtaaatatctgtaccttgttgcatgttgtacttagatgggcgagcagctacaccgtacttaaacttagtgccaacgcccttcttaacaaatccttcacctgcactagtacctacatacattgcaactttttcatttgcaaaaggacctgataagtagtgttcactaccagcagttctgaagtaacctgctttaacaccatcagcgtagtaattgattaccttctttgaagttgaaccagtaaagctaatcttattagtaaagtttacaccagcatctttcataccaagagtgtagtaatttgaaagtgagtcaaaaccagcaccaacaattttatgaccactcttttcataaattttcttagatgctgcttttaattcagccattgtagttggaactttaacattgtatttcttgagaatatcagcattataagttaatgtttcaacagatttattaaatggaattccatattgagttcctttaatttgagctccttcaagaagttctgtcttaatgttagatgccttagcactaccccaaccaacattcttgtcattaatgtatggatttaggtcaactaacatcttattgttagcagcattccatagccaacctggatatgcttgagtgatagttggtaaattatttggtgattgtaaggttgaattgatttttgcttgtaaatcagtatatgcaccttgattttccaacttaatagtaatgttaggattctttttttcaaattcagcagtcaacttttgtaaagttgcttgttgaacacctgtcatagcatgccagaaaacaacagtagttttcttagtaaccttaggaatcttaacagaactagtcgtattagacttagttgaactcgtcttgctacttgaacaagcagtagtgcctactaatgctaaagcggtcataccagcaacagctaatcttttagcaaacttcataaggatttcctccaataaaactaaatacaacaatatttttgatttttaactaaagcgtgattgtttgaccacgtttaagtaaaatccggtccccataaggattttctgccaactccggatgcaatgtgtgcaccgggcaaagaatgcgaggttgaactaatccaataatttctttgagttctttatcatcagcatggcctgaacaacgtaaggcaacgaactctatattttgcctttccagtgcgtcaacaaaaggtttatacgctggatcaaaatcacccaaaggttctgcatttgagtgaatgtacaagccatttttcatcaaatcaccataatttgtgaccacttgccaaaggtattcatgattgtcttttaccaagtcttcgtatgcaatttccaatttaggatcaagcgattcatatttcttttcccctggcaagtagtaataatggtaatctttattcaatgcttctttaagcaaatcagcccttttagcatgtagcacaacttttcttggagattcttcaacaatctttaaaagtctttctacattagtggggtaagtattaaatgttatttgtctttttggattttcttgctctaattgaacgattttttctgttaattcatcttcatttttaggaccagtaaactcttgacctatatgttcaggccacgaaatccctgtgccttcaacaataaataaatccgcattttttacagctgtaaggtattccttaacccattcaggatggtaaccatgtaaccgaatatctcccgtaaatgcaatcagcttgtccggtgttttgataattaagccagttgcaccatacgcatcatgatcacttggccatacttctaaagtaatatcacctacagttattggacttttatattttgcaggaattattgatcgtgtatatcctttttcatgattagtagctggcaataaaaaatcaccattttggtttaaaaccggtaaaagtgctgcagtaattggtccagcatataaaggtatttctggtgctaataaattaagtgccttactatgatctaaatgcaaatgagaaatatatgctgctgcatgttcccatctagtatggtctaactgcttaccagttatcgcaggatcataaaaattaggaacatcaccaatcaattgatatttaatcaaagtttgataactttcgtctggcaaatttagttcaggccgatatacctctcctaaatcaaatagaacatggctcttattataagcgacttcaatcattggcccaccaattgttgttagaccattataaaaagttacagtagttttatcctttaaggtcatttctaactactcctcgaataatttgctttctaaagataaagtaaacaatcagaattggaagaacagtcaaagtagctgccgctaattgaagctctgtttcactacctgaatctgatgcaaatgaagaaagtccattattaagcaatctcatactatcttcattggttacaagtaatggccataaaaaggcattccatccactaataaagctaagcaaaccaactgtaaatagcccacctttactcataggaactaatactttccatatgtattcccaatcacttgctccattaatcatggcagccttataaatagtatctgaaattgagccaaaataactttgtaaataatacatgtagaaaatagaagttaaaaatggtaatacaagaccaagataagtatttagcaagcccattttggcaatagtgttgtaattagtaaaaattattgcttctccaggaaccattaacaaagaaagtaataaactttgaactagccctttacccttaaatttcaaacttgttaaagcaaaagctgcaagtaatgcattaaacaaacttactatcgtagtaaccgatgcagtaataaatgtatttaaaaagtatctagcaaatggagcctgagcaaagacctttgcataattttcccaattaaacttgtgtggaattaatgttggtggaattgttgtcgtttcactataagacatcaatccccctaaaatcatatatacaaatggaaatactgtaattaatgcaaaaatagctaatactagataagcaattaaattaccaattctaatttttttcattagtatcttccaatctttttcatcattttacgttgtaaaaatgttgtcagtaaaataattaagaataatacgacagttgcagccatggcaacaccgggcgttccaaccatttggaatttattgtaaatgtaaaataccgctgttgttgctgaattaccaatacctgcctgtccattaaataatgcatatacagatatataaattttaaatgcgccaatgatattcattgttaacaagaaggctagcgttagaactaattgtggtattgttattctccagaatttctcttgctcactggcgccatacatatctgcaagcacataataattaggatcgatatttcttaaagcacccattaaaattacaatatcaaaagctaaggaagtccaaatcccaaagataattattgtaatcaaactcatacttgggtcatcaatccaattaggtgctggaagatgtaccgcttttaataggtaatttaataacccatattcaccattaaagatatatctaaagacaatacctatcgcaattgtactagttacatatggcatgaaaaaggtagtttcaaaaaatgacgaatgctttactttactaaaaataaaccaagctagcataattgaaattgctaaactaattggcacagcaaaaacagaataaatcaaagtatttcttattgcgcgccaaaattcaggatctgaaaaaatatattgatagttagaaaagccggtccactccatgttaattagtggtccactttggaaactcatcgtaaaagcccgcaaaattggccacacactaaaaactgtaacaaaaattaaagttggagctaaaaataaccatgcctttttttgattagttttcattagtaaattctttctccttccggagtgaagataaagattcggtcaagtcgtaatttaagttttacttgttctcccgccttaattggtacttccaaattaacaagtgatctagcttgttggccgtcatgattaaacttcaaaattctctctctaccaattaattcaacatcaacgatttcagtagatatttcaccattttcagctggagtaatattttctggccgaactgataaagtatagtccccatcaatcaattgttttctgaatctttgtgcatctaaatcactaattttaattgaaaagtcacttgctttaatttcattattttcaacttttacagcaaaattatcaattacgggatttccgataaagttagcaacaaaatgatttctaggttctaagtaaaagttctgcccattatcatcttgctgaattactccattattaaaaagtattatcttatcaccaattgataaagcttcttcttgatcgtgagtaacaaataaagtagtaattcctacttctttgactaaagctctaatttcttctctaattttcaatcgaagtcgagcatccaagttactaagaggctcatccataagtaatattttaggttcaccaactaaagcacgagcaatcgctacacgttgctgttgaccacctgataaattaccaggtttttgatctgctaaatcagtgatttgtgtcaaagccatatatttcttagcaattttctctgcttcttccttaggccgttttgtttttccaacagtaagtggaaacataacattttgtaatacggtcatatgtggatacaaagcataattttgaaaaacatagccaatttcacgattctttggttcaacatttactacatttttaccattaaataaaatttcaccactagttggattaagtaaacctgctagcatgtttaaaatggtagttttaccacaaccagaaggtcctaataaacatacaaggtcaccttttttaacgctaaatgaaacattcttaattgcttcatggccgttatcataaaccttacgaaggtcttttacttcaacaaatttttcttcgttcatctaataactccactacttaatttaaaaaatctcttattagagagtacggtatttttaagtaaattacaatataaaataataataaaattcggcttttgctcatcattttattgccattcatatttttatatatatacatgcgtaaaatacgaactttatttatataactataaaatcaattagctacttgtacactattatctttacttgctcgcccattttgataattaaattgatagcccggctggacattaaaaatatagacgttaaaatctaatgatccatcagtagaaactgcttgtaaattaatgccacgtgccattaattcagtatctttaaaaataggtgtagcttggtaaataactttttttccttgccttagtgtttgtctaactttactctcaaaaatcgtttgaaccttttgattagaataagctgtttgagtaaataggtttttagggttattttgatcccctgattgattatttggctcataattaccatcttgatctattcctgctgaaaccgaatatgcaattaaatgaccacgattatatatttgtattccattagaacgattagaatgccaggcagttggatttacaaattgccttactcgtaaactttcattagcaacatttctttgttctaaaaagccagtatttgaatgagaggttctgttgaggctatctaaattagaatagataactttattaaccttccaagcattttttatcaatgttgaatgattattattaactacaacatatcctttttgaccagattgaaaatttaaatttgctaatctttgataatcattagtagataatccaccatattctgtatcagcacttgaagctttaaaaacatttttaggtgaattggttgaatggttagaaccatttagatatgtaattgaattaacagcagtcgataaactaccacctgaattttgataaatacctaaaaaagctaatactaatacaataagaaatgaagtagcaggattaattcgtttatgcgatgttcttctttttctttttgacattattgctcctaacttcttgcccaactatctagcatatcaaggaaaaaactttcactaattcgagaaatcttatttccttctgctatcaagcttcttgctttttgtaattcaggattacttgtagaaaagaaatcctgattccccataactaaatagttagtcatactatcaacatgcgtctttacgcacccacccatattagtcgcaattaccggtaattcttcattaatagaacctgaaaaaacaatatttttgtttttaaatggatttcgcttaattaaatattcaaatggaattttttcggttaaaatacaattcttcaaattgttttttacttcacttaacatttcagaagtaaactgtttttgatatatatcaaagacagctttagtatctaatgaatcctttaatcctctatgtgcttctgattcactgatacccaatcgctgtatacagtctaataatcgattatgactttcctttttaaaaaagactcttgaaaaatgtaaaacatcaatatagttattactcaatctttccagattaaatttttcacaaagatcataaataaaattcaaatcaaaattaacgttatatccaactattacatcttccccaataaagtttcgaaaatcagtaatggcctttttaaccggtattccttgagttaaaattagtttctcatcaattccatttagctttgtaataaattgagggaccttattatttttaggatgcttaactagctgactatatttatcaactacttttccatttcttactttaatgcctgcaagttcagttactcgatctcgatatggtgatagcccagtagtttcaatatctaacatcgtataatcatctaaaaactctactagttctcgccctttttttcgtaacttctcagctaaatcttgattagaaaactctaattggccagatactatctttactgtcattaatttattaatccttccaataaacttttactattacttccagttcctatgcttcgttttacaatattttgaggtaaatcagaactatctaaatctgcggatatgtaatgccaattttcaaactgacttactaaatgaagtattgggtcaagtaattgtggacttaattcatctacacctaagcctaacacaaccatcttcttatcttcattattagtgataaaaatccgcattctagtattggcatcagtatcaggataaaagtgtgcagttagtggcatgtgaatttccatctcactattacagatttcacacttaggaacaccttgaattgctaaatcgctctttaagccatggttaacaccgcttgaacaagccatcgtcgtccaatcaccaaagatattaaaaatctttttagaatcaaaaccggcattttcaaaggcatgagtaaaatagctagtagcaatgaaatagtctttaccagttaataactgttttaattcgagcatcgcatcagatggctgataattaactgaataatcatcaataaaacgtcgccacattgtccattgttctggccatgatggcaatttcttatcaagtgcatccccaattgtatggacatcatatttttctactaaatcagggtattgtactttaaagctagcttcatctaacatgtcaaacccatctgcaatcgcaaatttattaccagcagtaactaaaatacaatctgcatcatcaattaatttttttgctttttcaaaatccattttttatctcctcaaaggtgtattatcacgtttatcgtctaattcgctatgtaagtagctaatttcaaccaatacttcagccaatttagctatattttctaaactagcatattcatatggcccatgaaaattagctcctccattaaataaattaggcgttggaatacctttttctgaaataaaatcaccatcagttccacctctaaatggaatatgcttaggctttatattcaacttagcataagcatggtgaaccaaattaacgacatatggatgctgcttaattaagtcaccaggtgatttatattgatttctcatagttaaagatagtcgttgatcgccgtattttgcatttaatttatcaacttggtcttgaataaactgctttctcgccaaaaaatcaagcgtatcaaagcttctaataatcaaattaacttctgcatgatcaacattgcctttaaaactagttaataagtaaaaaccatcataatctttacttttttcagggacaaaatcctgaggtaaagcggccacaagttcattagcaattaagccggcatttaccatcaaaccgtatgcttcgccaggatgaacaacagtccctgtaatttcaacttttgcttctgcagcattaaaagtttcataagcaatatcgccaacattgccattatctaaagtataggcaaattcaactgggaaacggctaacatcaaaacgcttagctcctttcccaatttcttcatctggtccaaatgctaaccataaatcaccatgttcaatttctggatgttgcagcaaatatttagccattgctaataaaccagcaattccagccttgtcatcagctcccagtaacgtatcacctgaagctgtgaaaatcgtatttccaatcacttcttttagacttggaaattctttaggccttagaatatgcttactatctaaaactaaatcatttccggcataatttgaatgaactttaactttaatatttttactattgtaatctgctgtatcaacatgagcaacaaagccaattgctgatacttttttctttgttgtagctggaattttaccaactaaataagcgtctttagctgaataactaacttcttcaagccccagcctacttaattctgcttttaactccattaaaagttcaacttgtccaggactagttggaactgcgtcattatcaggataagatctagtatccatttcacaatacttaataaagcggtcagttatgtagttatagtcaattttcataagaggcgcctcctttttctacaattgtatgctcatttagcctataaaaaaagacgccaaatgttggcatctttgtctagtaaaacgctagcttagtctttgataagcttttgatagtactcatataaagtcttacgcaaaagtggatcatgagcgtagagataggtaccataaattccgcgtttaaataaaacattgatttgattcataaagagtcgcattttgacttgctctaactctttgtcatcaaacaaatccgttcttcttttaaaagcttcggtatctgtaaacttactggtatcaatttgaatttgattagtatctggaacctgataaaatggcggacttaaaattataccagtataatttaaatcaaaaccttggcaagtataaaatgaccccacttcattgattgtctctggaatttcagcccaaggctttactgtatagttatactgatcccaaggcattttaaactttccttctttaatataatgtttcttgccatcaagaatagaaggataacccgtagtcgacaaaattctagccaaaccaacttcttgatttcttttaacaatttcttgccgcattttttcggcatcatcaaatacccgaaaatcatatccatttctagcattctgaggaaaaggaattactttactctcatcagtaaaagtattgaaccagtttattaattctgaacttgcattcatccggaattgatgggttaaatgataatcttcatgaggatattggtgcgtaatttcttctaactgctccgtcgaccaataagtcttagtgcgcattacctgatattgatcaaagactaaaattataacctttgctcgtttaataatttcaactagttgattatcataagtaaaattattatacgcatctcgatgtgacaaaagtagatgtgcctcatcaataacaacaacatctacttttgtctgctttttatctaatccattaatcagagaagtaggtctagtaaagtcttttttatacaaattagcctgcttaccggcgatttctttatacaccttgagaatttctgggtgattaaccaaaaagtagtttttggtttgatataacggactatccttttcagttctcgcagcaagttgaattttgttaaatagatgagctaaaacaacacttttccctgttccagcatccccataaaccgtaaaaatagctggtgtatcaccgttaatatgttttttagtaaaggccaaaatttgcttaactaatttttcttgttcactagttaaaggtaaattaactgctaatttttgtgtggcatcgttagttaactcagacaaaacaatctcttttctatatttatgatagttatacctttttctatttaagcataaataaaaaaagccgcaatcttgcgattacgacttatcaatattaatgttcagatgcaccagttgttgtatctggtttttcttcaacttttggcttttcttccatcttagcagcttctgccttagtagaagctccagtcttagcatctggatcagagtttctgcggtaagttgcaccagttgttgcatctgggtcaactactaacttttgaccagttgtttcacagaagtacttaacaaatggatataaatcttgtacccattcataaattccgcggtaattaccttcttcatcttctactcgcttatagtagtgcaagactaattcttttaaattaccggttggaactggcatgtacacatcatcatgtccaccttctttggtgcggagtgcgtgtacaactttcttagcattaggaataacatcacggatatcagggtgaatttgtcccattgtatcaccaacttgggcaggaacacgcttagccttcatcttgtagtttggatcttgaggacggttgtaccacaagaattggttgttttcatctacaaaagtcaattctccaaaagtatttctaagcatccagtttaattgattaactgtcattaaaccacaatcaagtttaacgtagtcatcgccttcagcagcattaactttctttgctgctttatcaagccattctggatcatcgttttcaataccagaaacggtatatttacctttgcctttgcaatcaaagtcttcttttaagtaatcttcaggattcatatccttaagccattttggttcagccatcgtagttcctcactttcatactaaaaacaacgtagacaccttaataataatcactcaccattgtttattcaagcctttatttaatatattttatatataaattgattatttattcaatatattattataaattgctaaaatatattcctttgaataataaaaagcatcattacgatgcttttatcttctattcgtgcaatattaaactacttaaatttaacaatctgatcaaacatttctttttcatagtcagaaatcttatgtgctacttcgattaccgctactttaggatttttaagtagtgtttcatgaattgcacgtgacattcctggatctaaagcactagttgcttcatcggctaaaataattggtcgtcttgaaaggagcgctctagcgatttctactctttgaatctgaccacctgaaagcttattaccattttcgccaacgtaaaaatctagtcctttattttcaactaaatcgtttaagccagcttctttaattgcagctaacagctcttcttcggtacaagttcttcctaaagtaatattaaagcgtaaagtatcatcaaataagaacggcttttgattaacataggaatagtaattatgcgctgcttcccaattaccagacacatctttttgatttataagaatttcacctgcttgtggatttttctgtcctaacattaatctaagtaatgtcgtcttcccccaaccactaggagccattaagagaactttttcacccggttttacttttaaatttacattggcaaaaattgtctttttatctgaagcagtttgatagcttaaatttttaacctctaaaccagtaaatgattcacgctcttcaacttcatcatctaagttagaaattgtagcttttttggtcttttcccacatcggaacagtcgacttaacttggttaaattcttggaagattgtcacaactggcgtaatgaagttcatcgctaagtcaactaacattactagagttccaactgccagtttaccctccatcatcaaaattccaccaattgtacacggaataataaaacaaaaaagttctgccgcagaataaattaattccaatgcccaagcttgcgttaggttcattgacttcaaggcattttccattctaagggcagattttgaggctctttgcaagatattgtcccgtgcattatataaattagcagcgctagctccatttaaactatcagaaatactttgagtataatcagcatttgtcttagtccaaaccttcgccttttgcgtaataattttactagtaaagatttgcacaattgccggagctaaagaagcaacaataaaaatcaaagtcatttcccatgaattataaaaggcaaaacttaatgcaccaacaaaagttatactttggaagatcatatctaattgcgcagttacacgattagtttcaatttgctttaaatcattggtcattaagcttaagtcctgctttatgttgctttctccttgatcgactaaataagcaatattttttcgcttaagatataaatttacctgacgaataatttccatcttattagcttcatataggaaattactgcacataaaaaatatttgaccaactgctgtaattccagctagtccaactaattgcatcatatcctttttaccagatgaagcaacattgagcattaacttaagcatataagcaataaataaaatgttgcaggctttaatcgtagcaaaaaagataaacagaaaaaccttgcgtttttgtgcgtatttaagactcatttatttctccttaaatattttaacgtcttttacattgtaactaattttaataaattctgcattctatccgcaaaaatgcattttatactaaaaagttagaattaatgttatcatttcattaatatcaaaaatattaacaaggagaggcatatgaaacaaggaactaaaatacttacgctagataatggttatcatttatggacaaatacccaaggaagtggtgatattcacctacttgcccttcatggtggacctggtggaaatcatgaatattgggaagatactgctgaacagttaaaaaagcaagggctaaacgtccaagttcatatgtatgatcaattaggctcattatattcagatcaacctgactattctgatccagaaatagctaagaaatatcttacttatgaatactttttagatgaagttgaagaagttcgccaaaaattgggcattgataacttttaccttattggtcaaagttggggcggtctactagttcaagaatacgctgttaaatatggtaatcacttaaagggtgccattatttcatcaatggttgacgaaattgatgaatatgtagcagctgttaaccgcagacgtgaagaagttttaaccaaagaagaaattgactttatgcataagtgcgaagctgaaggtaactttgataaccaaagataccaagatgatgtccaaatcttaaatatcaacttcgttgatcgtaaacaaccttctaagctataccacttaaaggatttaggtggaactgctgtttacaatgctttccaaggtgacaatgaatttgtcattactggtaagttgaaggattggcacttcagagatcaacttaagaacattaaagtaccaactttattaacctttggtgaacatgaaactatgccacttgatactgcaagaactatgcaaaagttaattcctaactcacgcttagtaactactccaaatggtggtcaccaccatatggttgataatccggacgtatactaccgtcatttagcacaatttattcaagaagtagaaactaatacatttaacaaataatatatcgaaaaaagctattaggaaataatcatcctaatagctttttaactataaaaaattatgcgcgtgacttataagtaccttcttgagtattaataactaattcgtcaccctcattaataaagtcagggacagtaacaaccaatccggtttccatcgtagctggcttaccgccacctgctgcagtagcccccttaatttcaggttgagtttctgcgactttcatagttacagtggcaggtaattcaataccaatcaattcaccatcatcagtaaattcaagttgtacttcaatatttggcattaagtagagcgcatcatcatctaattggtctttagtgatttcatattgttcataagttgtagtatccataaagatgtaattatcaccttcagaatagaggtattgtgcacctttcttagctacttcaactaattctactttttcacttggtctcattgtcttatgaatcattgaacctgcacgaacatctcttaagtccatttgcataacagtattacctttaccaggtttgtggtgattactctttaataccctcattagctttccgtcttggctaaaaatcatacctttttttagttcaattgcatttaccataattaataactcctctaaaaaatatttttatcttaacttcttaattattaattgacgggggcaaagctagaactttcatcaacatataaataatccaattcatacatctagtataacaaatttaatagcatcttaaatacactgaatcaatatgatgtcctcttgttttatgcaaaaccacattagctcttgtcttcgttggtgcaataaattctcttaaatttactaaattaacggattgccacacttctttagcagcattaattgcctcttttcgattgctatgtgcccaatgatagtaataattatccgggttatttttattttgttccattaattcattaaaacgactcaaaaaccaactttcaattaagtcttcatcagcatcaagataaattgataaatcataaaaatcagaactaacaattgttccgttaggtggcaattgtaaagtattaatcccctcaataatcaaaatatccggactcaaaacatgcccaaatttatctggcacaatatcagatattccctgagaatacaaaggataaacaatatcttccttaccccttactacatctgttaaaaagtcatttaaacgttgcatattataactttcaggaaatccttttcgactcattagatttttaacctttaattcgttgttagtatataaaaatccatctgtagtcattctttggattttcaagtctggataagtcctttgtaaaagcagacgtagcaaacgtgaagtcgttgattttccaacagaaacagagcctgaaatccctataataaatggccttttagtcattgcttgctttaagaagtctgctttacttttctctgctttttttgattgttcaaacattattcctatataggcaactagcggttcatatacttgtcgaacatcggcaatacttaaaacatcgccatgtgagttaattttttctaattcttcgtgactcacttgaatatttaaattaggatttagatttgcccattttcttctactaaagtgtgtaaaagatttcataattcaccactccaagttactacatttcaaatataaaaatagcataaaaattaaaagtaggcgatatctgcctactttctcaatttcaaaataaccgttaaaatcacattttttccgtcataactagcattgatttttccgccaaaaactcttactaagtcttgcgccatcgaaagtcctatcccaaatccacctttttgactattgtgagattcatcagatcgatagaatctctcaaaaaatttattatagtttatgcttttaccatctttaaaactatttttcacctgtaaaacagcatttcttcctaacgagcccttattcaggttaacacttacttggccagtttcatcacaatatttgttagcattatcaattaaaatattaactaattcatacagactttgtttttcaccattaacaaataaacccggttcaatttctatattataattcttaccatctttttgaattaaacttttaaaactattagccgctctttttacagaatctgaaaaatcaactcgctctagaacaagctcatccttttcactcattcttgctaaactaattagttgattaatcagcattgttaatcgttcaacttgttctttggtactttcagtccactcatcacttttgccaatcatttcttccatctcagtattagccgaaataattgcaagaggggtttttaattcatgtcctgcattagtaataaaacgtcgctgcttttcataagcttctacaattggtttaattgcctgattagaaagcaaaagtaaaatcaaagtaaaaaagattaagccactaattcctaaaaaaattgctactctaaataaatgcttataactagcggttattggcgtagtatcaagaaatattgcaatcgtttgattagaacctttactttttactaatataaaacgatatggattcgaattaatcataatactaccttcactagtagtattttttatagcctttttaattgaagcgctgttactagaaatgtcactagcagaaattgtagagatatgtgtattatcgactaattttaactttcctttattagataagctgagtgcaaaataacgatacttaaataatgaatccttgttagaatccggccccaaagtcttgcgagcagctttttgatttagctggcctttattttgggcaagcagccgtaaaacgctagttatttccctatctgttcgaaattgagttgctaaaacaattccgccaaatgatgcaaaaaggataattgataaagataacactgcaactgcgataaatttacgccgaaatcttttaatcatttattctcatcctttctgtatttgaagtacatagcttccgtccttttccccagatatttccacatcagacccgattgcttttaatttttcacgtaaatatgagacatatatccacacgatattttcattttcctctgaatctttccacacgtgtgaaaaaatagtctgtgtagaaagaaatttatctttatttagtaataaatattggagtagttctgtttcttttgtggataatctcactgaatttcgactagaaatttcctgattttccacatctaaaaataaattagccaactgcatttttttggtattgtaattgtcttctcttcgttcttttgaacgtaaacgagctaataattctttcaatgaaaacggcttagttaaataatcatcagctccatcatcaagacctttgactttatcatcaatttcactttttgctgtcaacattacaatataagttttatccccacttgccctaatttctttaactgcagttagcccatctttaacaggcatcatgatatcaaaaatcatcacatcatatgccttttgctgggccatttcaacggcttcttgaccattaaatgtgctatcaacatcatagccctgacttgtcattgccacagtcaagacgtgatttaattgtttttcatcttctgcaagtaaaatcctcatgattcatcttccttaattaactgtcgaatagtttgcatactcaagtcacaacttgccaactcatcagctactcgttttagctctttactaatttgctccggatttttgatattatgtttatacttcatttcatgttccaaacttgcccaggtatccattgcaatcgttcttaattgaatttcaataaaataatgtcctggtttctgaccttttatatcttcaaagttgacttttttatcaataattaagtggtaagaccgatatccattaggtttggcattttttatgtagtctttctttttaacaatatgaagatctttttttgattctaacaatctaattactgtataaatatcatctacaaaattagttacgattcgaatacctattgaatctctattttcaatcaaagctgattcaggaattaaaggcaaccctttgcgctggcatttttcaatcatacttttttctgatttaactctaccttcaaaatgttcatacaatttttgtccatgctttttttgatattcttcattcatcacggtgatttcctgccgcatatcctttaagataagaggtaaataatcctgatattttccataaatgctcatagtataaccttcctttgttatacttggcattttagcagagctttaagaaaaaagtgtgaagaaaaagccacctaaatgatggcttaataattacttatcaatatataaatctttcttaacttgtaaaagaggacttaactttccacaataaattatatctaatttatacatagctcttgaagcaattgtataaactaactgactctcatcaaactcatgatagatattatcacttgcatcccacataacaacagcatcaaattctaacccttttgcaagatatgatggaacaacaatcgtaccaggtaccaatcgttgattagccgaagcgattaacgtagtttttatctgcttttcttttaatgctgcaaaaacggccttactactttccaaatctttagttattatagctgtagttaatttttgagcatcattttctttaatcacagatattaaactatctatttccgattcaaattctgctcttttataaaatgctggtttaggtccttggcgattaaatgattcaattttttcaccttgaactaatatttcttttgtaaattcagtaatttgcatagttgagcgataagatttagtaagttgtacaacttctgttttttcaggatcaaataaagtggatatttgagttaataaatcatgacttgactctttagtaaaaatagcctgattcaaatctcctaacatcgtaaacttagctcttggaaagttaaagcgcaaataagcaatctgaaatggtgtataatcttgaatttcatcaacaaaagcatatctcatttcataattggttctgcgtcctgtaatcaaatcgtataaatacagatatgcacttacatcagtcattttaattttcttatttttgaagctggctataacttttgaaatatgattatcccattcttcatcagtaaaaccatatttagtaaagtctacacttctacctactaatcgtaagaaattaatgtattgtcgccgaatattcaaaaactgattatgatttatctttttattaactttttgaagttccttaattactatttttctagctaaaaaacgctcttctttttcacttgattcaaattcttgatctggacgatcgtataattgattcaattgctcctgactaagattttctattgtatctgcaacccatgctttcttactttcactagcaatcatgtggtttaaactattgaccaaactttctcgagtcgcatcaattctattagataatttataattatgtggaaatgaatagtatatttctttaatcttttctttactaaaaaatggcttatctttatctctgaaataaagatctttaaataccatacctttttcttttaacagctgtgcataacgagtaacaagcttaaagaaatatagtgaatctttgaagtcctttattttattatttttttctgaattttcaaattgctcaaataagttttccacacctatccctggcaaacgccgactcacaaactgccaatatgtcatttgaaccatattttgttcacccatttctggtagaacattttcaatatagtcattgaataactgatttgggctgaacataattacattagaactagtcagattacctcgatagcgatataaaaggtaagcaattctttgtaaaatagcactagtcttaccactaccagcagcaccttgaacaaaaagtaaatctgcattagtattacgaattattttgttttgttctttttgaatcgtcgtaacaattgacttcatctgtgttgatgatttctcacccaacacttctagcagcatttgatcaccaattgattcattagtatcaaacatattttcaatttgaccatcttcaatcataaattgacgttttttagtcatattgacttcttgctcaccattaggtgcgtgataagttactttacccaacttaccatcataatatattgaagaaattggagctcgccaatcataaatcaaaaaatgatcatctcgatctgcaaatgagcccaagccaatataaatagtttctggcttttcgcctacttcttcaaaatcaactcttgcaaaataaggctttttttctagtcttttaagagtggataattgtttgcttgaatgttgccatgcattttgcctttcagctaacatctgttgttgttgatgaattgataaagctgtatccatcgaagttgaatagccatcataatctaattttaaatcatcaaaaaaatgagcattcaaattacgagcttctttttcagccgatttgattgaacccgtcaatttagcttcttttttctttattaaatctaaaacttcgtctaagtgggcctgttcatatcttttttcattttcaaaattactcaaaagcttcccaccctttctaaaaatcttgcatactattgtagcatatctcggccttaagttataatttgtcgcactttagactttctttaataagctttggtaatttattcacatctttttcaaaacttccagatatatttttagctaaaaatggattattgtattaatgagggaataaaaatgaaaattatcaataaattattgaagttgggtatttggattggcataattgcatttgctattcatctatatcaaagcgattcttctatccaaactgcagctaaggactcagtagcatttttacagactaaagtatctcaactagtctccccaaatagtaagtcaagtgctagtgacgatcatgactcaaccggtaattatacttggacaagtaatagcgctactgtttatatcgagttggataatcaagttttatataatgcaacaatgaatgccattaatagctggaataatacaggagcatttaccttcaagattgttaattctaaaaagaatgctaatatcataataaaagcaatgaatgatgattcaactaatgcagctggattaactagcacttcttataatccaatatcacatcacttactgaaagcagttgttaaacttaatgaatattatttactaaatcaatggtttggttatgataatcaaagaattaccaatacagttgaacatgaattaggtcatgcaattggtttaagtcacactaaagaagttagtgtaatgtatcctgaaggttcttactatacaatccaacctaaagatatcagtaacgtaaaacagctatatgaagaaaataatcaatcttcatctagttcaaataacgcagcataaagaaaaagaggcatactatgaaaaaagtttacattatccgtcacggtcgaacacatattaatcactacaataaaatgcaaggttggtgcgataccccattaactaatgaaggaattgaaggggccaaaaaagttgcccaagtcctcaaaaatattccttttgatttagccttatctagtgatacaaagagagcaagtgatacttgcgaaataattatgaaagaaaatattaaccataatcagttacagcatctaactagtaaattctttagggaacaattttatggttactttgaaggaatggattctgacatggcttggcgtatgattgcaggacctgtaggattgcgaaatttacaagatttacttgataactattcaattgatgaaataaaagatttaatgaaaaagtctgatccataccatgatgcagaaaatgcccaagaatactgggctcgattggaacaaggtttaaacttaatccgccaattagatggttatgaaaatattttgctagttacacatggctttaccattagatctcttgttgcaaaatatggcaatggaaaatttgatattaaaactggtccacgaaactcatctattactatgatggaattaactgattctgataccaaaattactagttataatcaacttacactataaaaaaacagggctctcacttaattattatgagagtcctgtttttaattattagtttccaatttttgaaaaatcaaagtcagggaaccaaacttttgcttcacgctcagcactttcttgactatcagaagtatgaatcacatttcgaatattgtcatctggccattctctaccaaaatcaccgcgaattgtacccatttctgcattagatgggttagtggcacctgccattttatgtaatacatcaattacatgtgtacctgaaacaatcattccaatcattgaaccagaggtcatataatttaacaagtgaggaaagtatggcttaccaacactatcaacataatgttcattaagttgcttttcagttgcattaattacttttaatgcttcaattttataaccgcgattttcaattctggtaataatatcaccaatatgaccggcttttacaccatctggcttaactaaaacaagtgaatattcatccctaatcataagttatctcctttaattgaattctttaactagaatatcaaataaagctagaaactgtcaaattttttgtgtaaatagatctttctcgtaaattgtttttttaacgttttatttattcaaaataggattctaaggtatcctggacttgaccaaagcctttgtgaattcggttgaagtagcggtcattgtagctcattgcttggatgccaataaaagtatcaagcgactgttcagtcgggaactccgctttaggcttagccttgcgcttaatgacgttattaaaggattcgatcatgttggtagagtaaattgaagccctgatctgcttaggataattataaaaaacaagcaggtctggctcgatgtctttcaggtttctaatgacacgattgtagctcttgttccatttggcataaaaagcatgcaatacatcaacagcagccgctttattggcttgctggtgaatctgcttgaattcgttcatgattgcctcgcgatcgtccacgcgtactttagcgcagatgttgcgcataacatggaccaagcagcgttggaaatgagcttgaggataggtctttgccagtgctgctttcatgccgacaacgccatctgaaaggaaaagctctacttgctttaaaccacgagatttcatgttctggagcaacgccgtccagacttcaatattctcactaggcgcaatgcagtagtcgataacttccttgtgaccattaggcttgatgccaatggcaatatatactgcttctcgttcaaaagtttctcgacgcaacggtatatacgttgtatcaagataaacacaaaagaacttatcgctcagcttacgcttgtgataagcctcaactttaggaatcatttgcttagagatattagacacttgagctggactataatgactgccatacattttttcgatcaaattagctatttctctagtggttacacctttagaataaagctttataaccatatcttctaagagatcagtatgttgtttatagtctggcagagtgtgttgatgaaacataccattgcgatctcgtggcacttgtacctcaattgatccaaactgggtatcaattttacggaaatacgcaccatttctagaattaccagtattccagccatttctagcatagggatcatatcctaaaaaggcagtcagttcagattctaacatgtcattaacagcttgttggatttcatgacgaagcaaatcattaattttatcttgattgaatagagcttgagttatatttttggtaaaatcattcatgaaggagttcttctttctgtatgttttttttgttcaaaccaatcatacgagaaaggaactcctttttctaatgttttaggaaattaaattaaggaataattcatccttacacaaactattttacggtctctaaagctacattactaaagcttcttcaatacaattccttgataaagtttaacagtaactagataataaattgaatacaaaaccaagaaaataagtaatggtatccagaaatcttggtacggactaataacaatctttttaaacagttgtaatcctactaaaacatgacaaatacctaaaatagctggtaagaagaataatgctcctacttcatgtctaattgcacgtttaatttgcttagttctaaagccgatttttccaatcatttgatatctgatacgatctttttcagcaccggttaaaactttaaacattaaagtcgaggcaagcattgctaagaaagcaaagcccaggaagaatcccataaattcaaagcctgatactaagccagtaaccatttgataagccattggagttaacggtggtaattcatctggataaggattttgaattttgataacttcgagcaatttttcataatttgctaccatatttttggtcttaatcaaagttaattgtttaacagttcctgctactttttgataattacttgctgatacaaattttatttctttattaattccaataagtgactgcaacaaataattcatttgctcaacatcggattttttggcagtcagcttaacagtctttaaattagtaactgcttcactttgactggatattttcttagtgtcatagactttattaataaaaggctgcttttcaaactccgctttttcaaagtaaacgtagtgtttacctatcttgtagttataattaaattctcgttttccagatatttgctttaacagtgcttctgttttaggtgttttctttaaaattgcagcatcataataaacagtagcagagtaagtactcttataactttcaaaacgcaagccaactgtaattgctcctaaagctagggcaaagaaaattgaaataacagaaagaatttgtgtatattcttcgagtctaaactttaactgccccaaagtaaaggcacgtaaattcttgtactctaatttgtggtagcgacgtaataagtcaattagtaaacccaaacttgctttaaacaagaaatatgagccaaaagaaatcgtaaataaagaagttacaatcagttttacatcaaggctttgtttaaacaagataatgtaaccagtagctaaaagaccaattcccaataaaccaaaaattactcttaaaaactttttatgactaacatttactggtgattgttcttcccttagcaacttaattactggtgttctcaccaacttaattcgattaaaaagtgccgcaaaaaagaatactagtaagtaaaaggcaaacgttaataaaatcgcagttggtacaactggagaaaatgattttagctttattttaaccatcttcatcaaaagaactgttacaccttgactagcaaaaatccctaaaacaattccagctaaagtagaaattgcacccgtaattaaggtctccgtaaagattaaattaccgatttttcgtgattttgcccccaacattagatatgttccataatctttttttcgcatactcaataaaaatcgattagcgaagttgacatacgctaaagtaataatccctaacaacacagcaccaaaaccaaaaataaattgggtcatactcaaagttaccggcatgttacttttcaaaaatacgggattcatgattaaagataaaaacaagtaaaaaacagtacttgaaattactagtcctaaaaacaaaaccaggtaatccttgaagcgtgattttattccattaaatgataatttccaaagcatcgtaaacttcctccgctctagttttcaagtgttcctaacttagcgagtaattcctcataaaagactcttcgactcttctcaccttttattagctcagaatcaaccttcccatctttgataaaaataattctcttaccaaaactagccgagaaaggatcatgcgtaaccattaatgtagttactccttgcttattcagttcttccatagtagttaataattctctagcgctttttgagtctagtgctcctgtaggttcatccgcaagtaaaatagctggttcatgaactaatgctttacttgctgccactctttgtttttgacccccagataattgggttggatatttatctaataaatcagctatttccagacgtttagccactttttcaactaagggatcaatctttttggcaggatagttttgcaatgaaagtggcaatgcaatattttcacgaacgcttaaattttctaataaattgaaatcttgaaaaataaagccaatttctttccccctaaaatcagccatcgcatttttatttagattactgatatcctttccattaatttcgacacgaccgcttgtcggtttatctagtgttgacaggatatttaataaagttgtttttcctgatcctgatgcacccataataacgataaaatcgccctttttagcttcaaatgaaattcccttaagggctgtaaattgtttttgccccttttttccatatattttagtgacttcctttacattaactaagtttgtcataatctttcctccctcttttttgcattactgttatattcaaatatcacactatactaataaaacaatattgtcaataattttgtcttcaatttctttacaaaaatctatttatttgcctcaaattactaataacccttaaaataaaagtaaacgtataaaatgaaagaaaggtatctataatgattgataatcagcctcaaaagactaaagtagttgttgctggtgttaacttaaatgatcctaattttgattattacatgactgaacttgtaaatttatctgaagcaaataatatgcttgtagttggacaagttagacagaatcttgaacaagtatatggtggaacctacttcggattaggcaaactcaatgaaataaaaaatttagctcatggtttacaggcaagtgcagttgttttaaatgatgagttgacaccaatgcaaattagaaatattgaaaaaataactaaattgcaagtgattgatcgaactgaattaatattagaaatatttgccaatcgagcaaagactcgtcaagcaaaattgcaagttcaacttgctagacttcaatatgaacttcctcgtttacatcctagtgaaaacactttagaccagcaacgtggtggtggaagtgttaaccgtggttctggggaaagtaaactcgaattaaatcgccgaacaattgataaacaaattacagccataaaaaaagagttgcaaaatgttgcaactcaagaaagcatcaaatctaagagaagaaataattccaaattgccacaagtcgctttagtcggttatactaatgctggaaaatcaactactatgaatggcctattgaaggcttttaataatgatgctagtaaagaagtatttgtaaaaaatatgctttttgccactttagacactagtgtacggagaataaattttgatggaactaatgattttatcatttctgataccgtaggctttatttctaaattgccacataatttaattgaatcctttaaagcaacgttaaaagaggctagcgatgctgatttgattgtaaatattgttgacagtagcgattcaaacatgctccaaatgattaaaacaacgcaaaaagtacttcatgagattggaattactaatattccagttgtaacagcttataataaagccgacttaacaaacaaaaaatttccagaaattgagggaaatgatattttatacagtgctaaagatagtaagtcaattaaagctttagcaaaatttatcactaaacgtattttttctaattataaaactttaaatattgaattgccgcttaatgctggctctttattatcatatttacatgaaaatggtgatgttcaaaaagaaaaatacactgacactggaattttagttaaagtgaaattagcacctaaagattactctaaattttctatatataaacaaaaaagcgaatgatacattcgctttttacgttaactataaattagttactataaatatcccttccatactaaaattttatacaaaaaaggcatctacagtagatgccttttttaatattctaattataatacgcgcttagccactgatgggtagaagtattggctaatactttgcttaataacaccttggctaggagttgctgcgtgaatgtattgaccattacctacgtaaatacctacgtggtaaggtgcgcttgctgaaccccagaataataagtcaccaggttgcaagttattcattgaaacagttgtaccgttgtttacttgaacataagttgtacggccaagtgaaagaccaacttgtgaatatacgtaatttaccaaaccagagcagtcaaatgctgatggaccattagcaccccaaacataagctttaccaagttgtgctgaagctaatgatacaaccttagctgctgatgaagtagctgattgtgtagtatttgatgaggtgtttgaactagtatttgatgaaggatttgaagcaattagatattgtgctggaacccattcattagcccctacgctgtaccaagttttaccatttgaatcagttgctgatgcaacaacagtaacacttgaaccgtgagttaatctcttaccagtaaatgttggattattgtaacttgtccaaacattaataccataacctgctacataattgacgtacattgtagcattcatttgcttagtatttgcgtcaacagcatattctgctggaatccattcatcagtacccaccttgtaccaagtcttgccctttgaatcagttgctgatgctaaaacgtttactgttgtaccatgagctaatctcttaccagtaaatgttggattattgtaacttgtccaaacattgataccgtagcctgctacatagttaatacgcattgtagcattcattgacttagtatttgcttcaatagtgtattctgctggaatccattcatcagtacccaccttgtaccaagtcttaccctttgaatcagttgctgatgctaaaacgtttactgttgtaccatgagctaatctcttaccagtaaatgttggattgttgtaacttgtccaaacattgataccgtaacctgctacatagttaatttgtactgttgaaggtgtagtagctgcttgaacagtagattgactattaattgcatttgctgttgctacaccggctaatgcaaaagctgttgcagctgaaatcttagctaaattacgtttaaaattcataaatatattcctctcaaaaaatcttcggtagcgagttttttaagctacatgttttatttctcaattaattcaatgaatataatacaaaagcaatgttacacaaatgttacaaaaccaagtctttactgttaaaaaacattacaaaagcaagattgtatgtaacaatagctaattttttcgtaatttagttatgattttgtctatttttctttgagtttcttctaaattatcatttactaaaacatgtgcatatttctttaggctatcacttaactgaagatcacgcttaaattcgcggctattaattctttttagaatttcagttggttcgtcaccacgttctacaagtctttcttctagtgtctccaaatgtgaaacttttaaatatataaaataaaattgatttgcttgcaacttttccacatatgacttcacgccagctgtatcaacaattaatgaaacaatatcattagttttccaagctttttctaaaccttctcggcttgagccatattgatatgatccatatttaacgctttcaaataaatgtagttttgcaaagctttcttcattttcaaaataataagcatctttgctttcgcctgatctaatcgctcttgtagtatgcgttaaaacacgtggaatttgatatttttcttctaaatagttggaaattgtcgtttttcctgctccacttggtcctgcaattataattaattttttcaaaaataactctccccgcttgaaattcattaacttatataatagtatttcactatcgttgaaataaaaagagagaaaaggcgagaaaatgaaaaaaaatgatgtaaaaatcggagcaattgttgaagcacggtctcaagaagaattgaagcacccatttcaaggtaaagtagaaaaaatttatgaaaactctgccttattatcaattacttcttttgatcctaaagatgcagcttcagttagtgatttaaacaataaaatggttattaattttaaatatttaaaagctgtaaaatcacccaaaaagtctgcaaatacaacttcaaacaatgatgttaagatttctaaaattgatgatgatgcatcaaataaaaagtaaatatttttctgtttagaatactttgaggtcttaaattaaggccttttttttgttaacataaatgtagtttctatggtgaggagaatacctgtgaataacaaaataaaagtcagcttatactggattatactcatacaaccttttttagatatctattggctctattatccaccattatcagaaattttgccttttgcattaccaaccattattcgaattttaggcgtaatcgttatattaggtatgttttttagtcaaaaacataattggcaacgtttaggaaagcagttgtggattgtagcttatatcataatattaattttttattcggtccttcatatatggcatgttaaagattttaacagtgttgatccaactaattatggctattcaactcttggtgaaattttttatctcatacgaatggtattaccattaataacaatttatattacatgctatgcagaacttacggaagaaattttttattcagtaatcaaatggattattggtttattttccggaaccattgttattactaatctttttacaatttctttaatgtcatatgaaagtgttttagatcctggacttcattttattaaaggaaatatttttacttggtttacaaataacccactcaattattactttttagcttctaaaggtcttttttacaaggcaaatacattaagtgccataatgttaatgcttttaccattaatgctttacattgtagtaaaagaacctaactggaagaattcaggtctatatctaactcaatcattagctatgcttgaattaggtacaaaagttgctacaattggtttatttattactacggctgtttttttaataatttatctactccattcctttatattcaaagatatcaaattaaataaaaaagctatcctcattttgacaattataactttattttcaagtttgatctttccacacgccccttcaattcaacgagctaattatgactcaacttctactccacttcatattactagcaaaactaaaaagaaatctaaacagctaaatgaagttttatcagatgggttaaagcaaaatcgtggtgaaaagcgtcgtaatttcttaataaaatttattaagcataatgcagcagcttacgctttaaatcaacgcttcatagaaaaaagttattcatacaagtatgatccagatttttggttaaagatcatgaaaatgcctattcaacaacgaatgaattatcgaattattgagcgtaaaatgttagaccaagttgtcaaaaataataataatcgcttagataattggttaggaatttcgtatatccgtgaaaacaatatatttattctcgaaagagatttcttagctcaaaagtattcattaggctggataggtatgctattatttactggcatataccttctaattattttatacagcgcaagcaaatggttattaaataaagcatatcgtaaacttcaaaacaccgccttattaatgtctacctctttactaaccatttctgcattctatgctgggaatgttttggattttttaacggcaacattcatctttgcatttatcttaggatatttattatctaaaatgagacaagaaaaaagaagctaatctattagcttcttttttcatttttaacttctctaacgaaggtggcgtcaggaactcttattaaataatatttaagtgcatttcttccaacatgaaggcctaatccattttgccaagtatttttatatttagcttcataaatagcaacataagctttttgatatttaacatcatactttgcaagcacttgctttgaatatggtaatttttgtgcaactgcatttaaagctacagtgccatcagaaatagtcgcccaatcactcgttacattatatcgtttgccttcagtaaagaaactatatctttgatatagtttcttcttttgtaccgaattactagtcacataatatgagcgttctgctgatgaagataatactaatggtttatacttaatactttgttctatttgactttttgaagttaaactaggattatcaaaaaaactattttgaatttgtacgaaaaggcctatcaataatatcagaacttctaaaaggtctaaagaaaatgtacgccaagtaaaatgcttttgttggataactatcatttttaaatgacgctttctgatgtgatacgatataaaaatcaaatagattaaaagaactaaccaaaccaatatacctagccaattccaattaaacataagctaattcctccttgtaacttttagtataagttacttggtatctataaataaagaaaaaatcatgattaaaatcatgattttttctttgccttatttttagttgatccagatttctcaggcttaatataattacgaatatcaactagtttttgattaattaattcagcaaagcgattcgcaatttcttcctcatttacatcatctgtatccgctaattcttcaatccaaaacttagaagcatttatatattcactagaaacttcgaaatagattttaaccggtaattgttcttcagctgaaacaaagttgctaatttttttataatttgcatacggtaaattaaccacattggtttctaaaataaaactagcaggtctttgtcctgttatgtcaagctgtacatgagctagagaatcatttttcattgctgctaaaacttgttttactaaattcttacttatagctcttaccttagctttagttaaagcagaatatttctcagtttcaagatcttgaatgtaatcctcattttcaattttttctagtagatcttttaatagtattttcaaagtttaccctcttcaatgtattaatttatatctttcaaaacttagattaaccaattacccaatatttatcaactacgaattaaataactttttccctattgactacatttgtaaactcactttaagttatttaaagcaatttagcagcattatctgtttacaagcgcttacattcggtgtacattgatgctgtaatagttattctcctctagtgaggtagaaagaaaggtcaacactatgacagaaaaagtatatactgactacttctatgatgaagcagattttgataaaaaccattttagatacaaaaatttgcacatcccagatgggattgaagcacaacctttagcagttccacctgttttaaagccagataaagaagaaggaaatgacgtttggttcaccatcgaatcaatggaaggtgaaactccatttttgccaggctcaaaaaccaagacctggggctacaatgcaccatttttaggtcaaacaatggtactcaaaactggacaacatgttcatgttaccttaaagaatagtttaaaggaattaaccacttaccactggcacggtatggaagttcccggtccatacattgacggtagttgtcatgcacctgtatatccaggtgaagaaaaagaaattgaatttacggttgaacaacctgctgcattaacttggcttcatgctcacccatgtccaagtacagcagctcaagtttggatgggattagcaatgggcgttgttattactgatgaccacgaagctgaacttccaattcctaaagcatatggcaaagacgaattccctattgttttacaagacagagtattccacgaagataatcaatttgattaccgtgctgattacgatccaatgggcgtatttggtgatacaccattaattaacggtgtaattaagccttacattgatgtaactactcaaaaagttcgtttactcttcttaggtggtactaaccgtcgtgaatggagattacacttcgacaacgatttagtaatgactcaaattgctggtgacgactcattcttagctcacccagtaaaaatgactaaattactcgttggtcctggtgaaagattgcaagtaattgttgacttctctgactacaaagaaggcgatatagtaaatctttacacagatgacttcaagctaattgaatttagaattcaccactttgaaaaggatgattcagtcttacctgataccttatttacaccagaagatccagtagttgctgacgatgctgttgttcgtaaagttacaatggatgaccacgacaagattaatggtaaacaatattccatgcaaagaattgatatgaaggccgaagttaaccatgcagaatactgggatgtaactaacactaactctaagagtcatggtatgcttcacccattccatattcatggcgctcacttcttagtcgtatcacgtaacggtcaaacaccaaatccaaatgaaattggcgtttacaaagacacaattgaagttgcaccacaagaaacagttagattaaaggttatcttccctaaagaaggcatcttcatgtatcactgccacattattgaacacgaagatgctggtatgatggctaatatcttaatcgttgatccaacaaaacctgagcctcactacgacttaatggacatggaaaccttaaccaaagcatttgctgaagaaaaaggtattccagaaagtgaagtcttcatgccaggtatgtgtactgaaggatacatgaatcattgccacgatgatgcaaacagtggtgctagtcatcactaaataaagctaaaatttattagaaaaaaagacctgcattgcaggtcttttttctaccaatttccaccattatcatattcactaacgttattattataagttgtattataactacttgaacttgagttaattgcggaatcactattagctggaaatacttgataattagtgaaagcattaggattggtccaatcaatagcattatattttttatttaagcgattttgtctagtttcttcattactaattttttgcttattcaagcctaaattagtacgaatataatctgatactctctgtaattcactagttgatgcaacctgaatcgaggctccatcaatccatgcatcatggccatgaatgtaatcactcttaatattatttgcaactgaacgataattaatagcaatagccatcatatcactaaaagtcatattagttgtcacattttttgaaaatgcttttaaaatctttttatagttagaaatactatttaggcttaaagcatttttgacaattgccataataatttgtctctggcgcatttgacgtccataatctccacgaggatcttcttttcgcattctcgcataatctaatgcttgcttaccatttaaatgcatctttccctttttgaaagttgtattataagtaaacgaaaatggaactttaacatcgactccccctacagcatctactagctcttgtaatgccttcatattaacttccatataataattaatcggggtattcagcaaaaccttagtcgtcttcatagctgctttgttaccgcctacttggtaagctgaattaactctaaacatgaaatattttccattatcacccctaatatcagctaataaatcgcgcggtatcgaggttaaagtcgacttttgcgtcttaggattggctgtcgccaaaatcatagtatcagaatttccttgatcatgacgattctcaattccttgatctactcccaaaatcaaaactgatataggctgcttattggtaatttgtgtagctggtgtaccaccttgataagtatttcctaaagcagcttctaaattaaagtagaaatgactaccccatgttgctataaatccaataataagaaaaataaataaagttaaagttttcttagactgtctattattgctgaaattttgcttatttgcagcaaaaaattgatttcgagatagtaagcgtccactttgctgcttgaagtgatattcttcccgtctacccagatggttttgtgtcatatccaattctcctcaacaaacttatatttaaattctgccactttttgttttaaaactatacttttttcattaattttaaggctttatttaagataaaaagatattttttgtaaatttgataagtaacacgctaaaataaaattattcaatatacggaggaattttattatggtattacccacaagaaatgaggtcccaaaagaattaacttgggatttaacaagagtttttccaaatgatcaagcctggcaaaaagaatttaaatcagtaagcaatgaaattgataaattaagcagcttaagcaccattattactaagtcaggtagtgatttatattctgctttaacccaaatcttttcaattgatcgccgacttgagaaagtttacgtatatgccacaatgtctagagatgttgacactagtaataaccactatttaggttttgctgcaatggctgaagacttagctaataaatatagctccgtaatcagttttgttaatccagcaattttatctctaagtgatcaaaatcttaaaaaatttgaattgcaagaacctaaattggcacattataagcattacttagaccaaattaccaacaagcgtcaacacactttagatgcacaagcagaacaaattattgctgcaagtggagcggctcttaactcatcaagtaacacttataatgttctaacaaattcagatatggaatttggttatacaactgataatgatggagaaatggttcaattatctgaaggcttatatagtcaacttatccaatcacctcaaagatctgttagacaaaatgcttttgaaactctttatgcaagttatggtcaatttcaaaatacacttgcttcaactctctcgggtaatgtcaaagcccaaaattatgctgcattaatgcatggttatgctaatgcaaaagaggcttctttatcgcaaaacaatatccccgtttctgtttacgataacttagttaatggggttcacaagcacctcgatttacttcaccgctacatgaaattaagaaaaaaagttttgggactacaaaaccttgaaatgtatgacctatacgttccaattactggaactccatctttaagatatagttataaagaggctaaagatcaagcacgagaagcattgagtattttagggaaagaatatcttgatcaggtagattatattttcaataatcgtgtaattgatgttgtagaatctaaaagtaaagttaccggcgcatactctgggggaagctatgatactgatccgtatgaattgcttaactggacgaatgatttcgatgcactttacaccttagttcatgaaaccgggcattctgtccattctgcatttaccagaaaaaatcaaccttatgtttatggtgaatatcctatcttcttagcagaaatagcttcaactactaatgaaaacattctaactgaatacttactaagtaagacaactgatccaaaaattagagcgttcattcttaattacaacttagaggcattcagaactacactttatcgtcagactcaatttgctgaatttgaacaatttatccatgaagcagatcaaaatggcgaaccattaaccgcagaaagattgaataccttttatggtgaactaaatcaaaaatattatgggattgtagaacctggcagtgatattgacaaagaatgggctcgaattccgcatttttattataatttttatgtatatcaatattctactggtttcgccgcagccgttgctttagcaaaaaatatcgttcatggtaccgataaacaaaaaacagactatctaaacttcttaaaagcagggtcaagcgaatatcctattgatattatgaaaaaagccggtgttgatatgacaacatcagcttatcttgatagtgccttttcagtatttgaacaacgcttaaacgaattagaaaaattactttaaaagaaaaaacagactaacaagtttcgtaatttaataacattaaattatttacaactttagtctgttttattttttacagctttatcattccaataattattccaactagatacaaaaagacgcaaataattcctaaataaagtcctgcccatttcaaagcatcctttaaaataattccttcctttccttctaacttcaccccagtagttgcaactgcaattgattgaggtgaaagcatattgcccgctgttgacccagccatatttgacgcaactaaccaatacttatttactcctaaatttttagcagcagataattgtaaatctccaaataaaacattagaggatgtatttgaacccgtagcaaaactgccaattgcaccaataactggtgcaaaaagtggatatattggacctagtcctttcaccaagctagttgctagtgttgtagtcattcctgaatagtccataacttttgccaaggcaacaattgcacataccgtaataatcgttttccagacgcttttcaaagttaatatcaaaagttttagttgctcttgcaatgaaactttttgaattaatccgccaataattgcggataataaaataatcgttccaggtgaggcaagatatgcaaaatcttgactattaccctggccaggataaatttgaaaattaattttaaaattattcaaaaagttattaatttgtggaaacagcgatgaagtaattaatactaataaaaaaatcaaaataaatggtgctgccgcaactacgatttcagtaaaagtatgtttctcctgatcaacagctgacttactttttactcgggctaatattattaatgcaatcagagtaactagcgacgccataattgttggcaattctgctcctagataataggaaactactaattgaacaagaccatataccagtccagctgttaaaggatagtaccaaatcttttttaattctttaaacgaagaatctactaataaaactaacaaaaacggtactaaaatacataaaattaataattgtaagctaacaaatatagctaaagtttgcgaatttagttttgttacatctgctaaagtaattactggaagtcctactgctccaaaagaagtagttgcagtattagccaataaactaataaccgaagccttaacaggcttaatattaaaagaaatcaatataccagcaggaatggcaacagctatcccaaatccagctacagactctaaaaaagccccaaagccccagcatactagtaaaactaatattcgtggatcagttgatacttggctcaatgcattttgaataactctcatatttcctgaataactcgcactgttataagcaaacaaagcggctactacaacatatgaaattactattaatcccattattgcaccatctaaggcacctaaaaaagtttgagtggaggttaatttgccacctaatattgataacaatatagttaaagcaagtccaatactagttgctttaactgcggccatttttaaaacacccagtgagataattaaccatataattggtaacaagtctaaaaataactgtattagtgaattcatctcatacctccagtatagttatacttttatattatcatatagtatttatacggaccaattatatgcttaaaaaaactcgcttacgcgagtttctaattaatattttagcattcctaatattattccaagaccaaataaatatagacaaattactattaaataaaggctaaaccattttaaagcctgttttaaaagctctccttcatgcccttcaagacctgtagatgcagtagcaaccgctattgattgtggagatatcatttttcctgctgtggcacctaccatattggaagctactacccagtcaacatttgctcctaatgattgggctgccgataattgcaaatttccaaataatacattagcagaagtatctgatccagttataaaagttcctattgcaccaattaatggagctactaacggataaactggtcccattaaagctactaagctaactgctaaagcatttgtcattccgctatatcccattactttggctagagcaacaatcgtgcaaactgttaatgtggtttttcctaatcctttaattgtaacaataaatattttacttaattcctgtaatttgattttttcaatcaagccaccaataatagttgcaataattattaatgtacccggcgaagctagatatgcaaacttaaaactacccttgccaattgaaaatttaataatgaattgatttaagagctgattaatacttggaacaagtggagaagctagtaatacaaatacaaacactaaaataaatggggacattgccttgagtacttgagcaaatgactgacttttctcttttttaccctcagtttgcttttcattttgctttcttaattttgctaaaaagatagtcactacaatactgaaaattgctcccacaattgctggaagctcaggtcctacaaattttgcaacaataatttgaggtaaggcaaaggcaaagcctgaagccaagcaaatccctgctactccttttattgctttaagactattttcaactagaataactaaaataaatggaatcaccacaattaacggaaatagttcaaaagtgacataagtggataattcactaccattaatttgggtaatattagctaaggtgataactggaaggcctattgcgccaaatgctgtaggagtggtattagctattaagcatattacacttgccctaattggatcaattccaaaagctattaaaatacctgcaggaattgctactgctgttccaaatccagcaattgcttctaagaatccaccaaagccccaggcgataattaacaccaatatacgtttatccgtagaaattgaactcaataaatcctgaataaccttaaggctacccgatttattagttacattataagtaaacaaagctgccacaatgacataaataattggaaataatgccattaaagctccctctaaggtagcactaaatacattaataaggggcatattaaaactaaacaaggctaaaataattgttataattaaaccaatcatcgtagctttggtagctgccatttttaaaacacctaacgaggtaattaaccaaataattggaatcaaagcaaaaataaatttaatccacatacttacattcataatactgcctccatatttaaaaccctataggttgattttattatgaaagcgctttaattgtaaagtgaaatgtattaaaaaaatgacgcaaatctgcgtcatttcaatgcttattttttcacaatctttgataaatatacaatcaaatatactataacttcaattacagaaatgaagaaagtaactggccaattggtaataaagcctaaatataatccggcccagacacctattaatgctaatcctacagaccaagctatcatagctggaatcgttcttcctaaatagcgtgctgttgatgcaggtaaagttaataaaataaaaactaacaaagagcctactacttgagatccaacacttacagccatcgccatcacaatcaaaaatattattccaaccagactaacatttacattatgggctaatgccccaatatgatcaaacgaatcaaagtttagttgtctctgaattaaggcaataattattaatactaataaagataatacagttaactgaattaccccttctaaatcgacaccaataatacttccaaataaaatattagttgcatagcgactattagaacctgctaaagataaaaataatacccctaatccaataaataaagcactaatagcactaatggatgactctttttgattagaatgaattgataattcgccaactcctaaagagcctaacagtgtaaataagagcattccccaaagaggattaattcccataaatacagcaaatgctgctcctgcaaaaccaatttcacttaaagtatgggctaaaaagctaaaacttctagctacaacataaaccccaaccactccacaagtaattgcaataaaagttgaggcccaaaaggcgtaacgcataaattcatatgcaaacattattcatacgcctccttagttaactgactaattttattatgttccaattttttatctttaaacaacaagtagtccttcatgtacttcttagcaagaggaatatcatgcgttgtaaataaaactgtcaacccatgcttttcatttaaatgcttaatgagagtcattaattcttcctttgctactggatctaaacttgcagtagcttcatctaaaataatgaaatttggctcatcaagcaaagcctgagctaagtatgctcgttgcttttgtccaccactagcctctcccatacgggtattttgaatttctagtaaattcgtttcccttaatatattatcaactctttttttaatagaggctgacttaaataaaggagtattcaactcaataaaagctctaatacttaaaggatagtctatatcaatattccgaaattggggaacataaccaatcttagtattctgagagaatttaaaagtaccattagtagctgttagcatattcataagaatacgaattaaagttgtttttcctgcaccatttggtccaagtaaggcagtcattgagcctttttttagtgtgaaatttaattttttaaaaacagtctgatcatcaaactgcatagtcaaattttcaactgttaaaacttctcccattactaccttcctttcaattaaatttttgatttttattgataattaaaaatcttatcagtatattcctatttactcaacaatgcaatgatttttctttgaacactactatcatcacttgatccaattaattcatcagcggcttccttagcaaccacttgtgctgttgaagtagcaaaactttttccaacatattcaagcattgcgacatcattgccactatctccaaatgctaccatttccttaggagcaattcctaatttttctcccaaaagcttgagtcccactgccttgttcatatttactttagaaacatcgatagtatattcagaacctgcaacaaaacctaaattaggatatttctctttcatttcaggcaccaaatctaaaacatttttatctaaaattacaaagctcattttaaataaacgatcagtaatttcttcaaaagaatctactgctgtcaatttgtgatagtactttttcatttcttgataaagttcagtaccatcactttttaaaacataagcactattcaatccagcccaaacaacaggatatctatattcattacaagctcttcttatttcattaatttcttcaatagttaaatcttcaattgccaaaatctgattacctttagcaaccaaagcaccattttctgctacgaaatataggtcatcaatattatctgggaaacgtgttttcaagttatcatattgattaccacttgcgataacgaaattaatattatttttcttcatcaacgcaatatctttttcaaaaagatcaacatcatactttttatcagagttcagccatgtaccatccatgtccgtcgcaattaatttaatcataattatcctcctgcttacttacttttattctatcaaaaaaagacgctatcttaatcgatagcgtctaatttatttaaatcaacataaattatttgtttactggttttttccagaatcctaaaataatagcagcaacaattgaaccaataattacagctaagaagtaacctggaatgttagtagcaagtgggaatacccagaaaccaccatgaggtgctggaacaccaacatgaaggaaaccaactaaagcacccgcaacagctgaaccgataacacttgatggaattacacgactaggatctgcagcagcaaatggaattgctccttcagtaatgaatgagaatcctaaaatccagttagtaataccagcttttctttcttcatcagtaaacttattcttaaagaatgcactagcaatagctgtagcaaatggtgcaaccataccaccaaccataacagctgccattaaaatagcggctgtctttgaattagggtcattagcaaatgctcctgaagcaaagacataagctgccttgttgaaaggaccacccatatcgattgacatcatacctgccaaaatagcagtaagtaatactaagttaccagttcccaagtggttcaagaatgctgtaatagctccattcaatgctccaaaaataggattaataataaagtacatgataagagctacaaacaataaaccaaagattgggtataagagcattggcttcataccttcaactgatttaggcaagcccttgaataacttcttaagacctacaacaatgtaaccagcaatgaaaccagcagcaataccacctaagaagccggcagcagaatttgcgctatggttaacacttgcaacataagctccaccaaatgagcctttgtaaacagttgccataaatccgccaacaaaacctggcattagtgctggtgcatccccaatagcttcagcaatataagctgcaagaactggaaccatgaaggcaaaggccatattaccagcattgtttaagaatacaaatgcctcagtctttgagccacccatatattgttcaactaagaatgagatggccatcaaaataccaccaccaataacgaatggaagcatatgactaataccattcattaattgttggtatactgcatgccaaccacttgctttagcttcgcttgcttcttcgccgttgccactatcgtggtatacactaccttttccagctaagatatctttaactaattcttctggcttgttaataccatcaacaactggaccagcaattaattctttaccatcaaaacgtgccatcttaactttcttatcagaagcaatgataacacccttagcgcgcttaatttcatcagctgttaattcatgcttaacaccttctgaaccgttagtttcaattctaacttcagcacctaacttttcaccggccttaattaaagcttgttcagccatgtaagtgtgagcaataccattaatacatgcagtaacaccaacaattaaaggcttatcgctagcttcttttgctgcttctttcttagctgctgccttttctgctgcagctttttcttcagcatctttagcttcttcagctttagtaaagatatcaataatttcttcaggcttagtagctgcctttaacttagcaattaaatcaggatttacaagtaaacctgaaagcttagctaatgcttgtaagtgagtattatctgcaccatctggagcagtaatcataaagaataagtgaactggctggccatcaagtgaattaaagtcaatacctttttcactcttagcaaacaatactctcgccttattaatgctcttgttacgagcgtgaggcatagcaattccttcgccaataccagtagtagattcgttttcacgagcccagattgacttaacgaattcttctttattgttaacaataccagtagcaacttctaaatcagccatttcattaatagctgcttctttgtcagttgcctttaagtccataatcattgactctggactcaaaatatctttaatccgcatattttcccctctttttctaaatttttattttacttcttctactttaatttgtggtaaaacagcatcaatttgactcttaactgcaatatccttagtgaaggcagtagcagcaccacaagccataccaattctaaatgcttcaactggatctttagtttcaaaataagttccaacaaatccagcaatcattgagtccccagcaccaactgaatttactgctacacctttagcaccagctgcatggtatacaccatcttgagttactaagtaaccaccatcttttgccatagaaatcatgacattttgggcacccatatcaagtaatttcttagcataagtaagcatatcttcatttgaattaaaagttacaccaaataaatcagctaattcatgatggttaggtttaataacaagtggtttatattctaaagtatcaagtaaagcttgaccagttgtatcaactacaaattcagctccagcttctttaatagttggaagcaagtctttataaaaatcggcccctaaacttggagttaaactaccactcattacaacaatatcgccttcatttaaatctgttaaacgtgacttaaatgcagcaatttcttgttctgtaatttgtggaccagcagcattaatttctgattcaacttctgcatgaatctttacattaactcttgttgtatcagagatttttacgaaatcactaacaatttgctttttattaagttggcgaacaagttctgttcctgtaaagccaccaacaaatccccaagctgtattatcaatttttaactgatttaaaatttgagaaacattaattccctttccacctgctaagaattgacaatcatttgtccggttaacttcacctgtatttactttttcaagttgtagtacatagtcaagtgctggattaactgtaactgtataaatcatttagtcagcctcctcataaactaaatcatctggtaacttatttttttggtcaaaagataatggattagtaatcaaggtcacctcagatacatgagcaaatttagcaaaatgctcatcaaatagctttgccgaatccattaatacaaagacttgtttagcctgcaatagttcttgacgcttaatagccgcttcagctggatcgggagtagtaaaattccctgtcttgcttaagccatttgctccaataaaagcagctgtaaaattcaattctgaaagctgcttaattgcaacttctcctacaatagcatgagtctgcttctttaatttccctcccaaaactcttgtaggaatatcttctttaagaagttcgacagctgtatctaagctattagttactactgttagatcagcaatctcttttaaaaaagggaccatttcataaacagtagttccagcatctaaaaatatataggatccaggttttacaaaattttgaaccgtatattttgctatttttcttttttgctcaacattaattgtgaaacgaatatgttgagcaatgtctctaattgacctattaactgcttgtgctccaccatgaactcttcgcaatatccctaattgatccatttctgacaaatcacggcgaatggttgattctgacgattgcgtcaatttacataaatcagcaacacgacagaaatcatgctggtcgacgtaattctttataatcgattggcgctcttgtgtcagcatcttttttcacctcgactaatatagtaaccgctctctcaatcaaaatcaatcattttcattcattttctatcacttttaggcaaaatttttctaacaaaaaagaatacatccccaaaggaatatattcttcatttaattattaatcttgatataaatacttgcttacagccttatcaacttccataccatttctaatcttcaaagctaattcaatcgttacatcagctaaaatagattgtggatcaattacattatatggatgatctggtgctttttcttgggctaatgataattcagtacaccctagtaagattacattacaaccgtactcatcatgcatcttttgcaaaattctgtggtagagttctttattcacaacacctttttctttgatattatgataaatcaaatcagttaccattggctgaatttcactaccgccaaattctacctcgcgacccactttttcaattgacttttcatatagacgatcatagattgatccttcagtcgcaattaatcctatctttttttcatttgggaatttttccaaaaaagtatgaattgcaatgtccatcatatttaaaaaagggacctctgttaaagcagctaaatcatgataaaagtaatgggcagtattacatggcattacaaaaaaatctggcttgagtaaagattgtttttcaacatcatcttttaatgcaaaaaagaaattttctttagtatgatccttgatgtaagctgttctgtcaggaatttcagcatcatttactaggatatagtttaaataatcttgatctttattaatttttacacggtgattaattaagcgaacataactttctgttgcaatagttcccatcccaccaaggatagtaaaaaagtgtttcatcctaatctactttctatcgattatttttctagttctttaataacatttctagccacaacaatatctgatgggtaaggagtgtttatacctctaactttttggaaaggatcggcccctttaccacaaatcaatacaacatcatttttaccagccatactaattgcttcacggattgctttttcacgatcaagttcaatagttacatctaccttagcgtgatcaattccagcattaatttcttcagcgatatccattggatcttcaaaaccaggatcatcagtagtaagaaaggctttatccgcaaaaacgcttaagctttgactgaagcctggtcgccggctcactcccttatcgccaggagctcctacaacaacaataattttaggattactaaattctttcttcatgaatcccattaaagccatcatacttgccttattatgagcataatcaactacaactaaaccatggtttttagttttctcagtttccattctacctggaatagtgacatgacgaatgccttcggcagcatgatcgtgattcgccccaccaagacctgctccaataatagcagctgtaccattaatttcgttaaagtcaccaatcatatctaaagtatattcgccttcaatagctaagtgcttggccttatcactagcacagaataattggaacttagtttcaatcaaatcagtttcttcagatttaaataaaaagtccactggtacttttaaatcaggattttcatagccttgtctactaaaaagataaatactatctggattagtagttgttgtagcagcagcataaacttcagagaaatgatctgtctctgcattaataatacacttccgtgaatttacaagtaattgtagcttgcagtgcaaataatctgcaaaattagggtgttcattagggccgatatgatctggtgttatgttcaaaaagaaacctaaatcataagttaaaccaaaaactcgattctttttataagcttgtgaggatacttccataactaagtgagtcatcccgttatctactgctctacgcatattacgaaataaatctaaagattctggagtagttaagcttgatttgaatgtatcttctggtttaggtccaactacatcattaactgatgaaaataatgcagttttaccaccattcatcttatcaaaaatcccttttaagaagtaagcagatgtggtttttcccttagtaccagtgaatgcaaccaagaataaatcgtcttgagggaaacgataaaatgcagctgataataatgccatagccttagtaacatctctaacaactagagcgtgcatcccttttccttcaggaaatggttgttctgccacataacaagtagccccattgtctttagccattgataaataagttggtctaaagcctgctcccttacaaaagaataaagtgttggtttgaatatcacgtgaatcataagaaatgtagtccattttcgtaggtacagaatcttgaactgcacttgattttaataagtgatgttcttttaaaattaaaatacatgtgtttaaagaaatactcatggtttaaaaccccttagattgttttcagaccaaattataacacagtagtcttgctttcgggcaaggctaccttaaatggcaaatgaataataaaacttgttattcgttcattagattcacatgtaatttttccatgatgtaaatctatgacttctttaacaattgctaaccctaaacctgtgccaccagttttagtattacgtgaagtttccactcgataaaagcgctcaaaaatcttttgaagtgctgctttgggaatagcttcaccattattttctactcttatttctactaaatttgctttaatctttttggcagataagttaataaaacttgcaccatgtccatatttcaaagcattagaaatcaaattattaaaaactcttactaacttttccgcatcagcatcaattactaagtcatctggattagtattgacatttaaggaaatattcttttcttcagcttctaattcaaagcctgcagctacttgctcaagcattgatgttaagtgtagtggtgcaaaatttacttttgtttttatagaatttaaagtcgtgtaatcaaacaaatcattggctaaagctttcatttgtcccgctttattataggcaatatcaacatattttaactgatcagctgtcaaactattatcagcctttaataaccctaaataaccgataattgatgttaaaggggtacgaatatcatgagaaacattagtaatcaaatcatctttagattgttctatttgcctttcttcattcatagcatttacagtactatcaaccaagaaatttattgaatcaatcaccttttgcaaatctgtttttactacgaaagaaatccgatgatcaaaatgaccctcagctatataatgcagttcttgaataacgtgtcgtaattgcatttggtgatagcgtcttaacaagcgccaatatagtactaacatatctccacagcccatgaagaagacaaaaattctttgccaagaccaaatatgtaatccatttcctaaaatcaaagtacttttcaagaaataaattccattttccaaactttgattagttaaaatagccaagtttattaagattataattgataaatttaaaagaagaagcaggataattgttaccactgcttccgcaaataactcgcttttttcacgcccagttaacttgacgcgcttttttttcatgtttaagcctctactttgtaacctactccccaaactgtttgaataacttcttctccatcagtagccttttgaattttatcacgcaagtgagaaacgtggaccataacagttttagctgaaacaacagactcttgttgccataccctttcaaaaatttcatcagcactaaatacccgatttggatggctagcaagtaaatataaaataccgaattctaatgctgtcaactgaataacatttcctgcaattgttttgacttcatgtgaatccttgttaattactaaaggaccaatttccaaaatatcaggtttatcacttgtaactttcttttgactacgacgaagtaatgaacggactctagccataacttctaatggattgaatggcttaacaacataatcatcggctccagtaattaaaccttgaattttgtccatatcaccagttttagctgaaacaacgataataggaatatctgaatcttttctaagttctttaattacgtcaattccagttatacctggcatcataatatccaaaatcatcaaaccaatatcaggcgtcgttgcaattttggttagagcttcttttccgctatatgcagcaattggttcatagccttcatttttgaggtaaatactaagtaattcaacaatttctttgtcatcatcaacgactataattttcataacttggaatcctctttttttactttctaataatctcaatttatattgtatcgaatatataaaaaagagcatgtaattaagcatgctcttttcatattcttaagattattcgatttcctttttaccagtgtataactcgtaatagtaaccttttttagctaacaattcttcatgagaccctttttcgataatatgtccgtgatcaagaacacaaatcaaatcggaattaacaattgttgataaacggtgagcaattacaaaactagttctaccagctaataaattatccatacccttttggataattctttcagttctcgtatcgatacttgaagtagcttcatccaaaatcatcactggtcgatcagcaatcattgctctcgcaattgataataactgcatttgtccttgtgacaagtcaccacctgaaccatcaattaccgtttgatagccattatcaagctcatgaataaattcatcagcatgagcaagtcgtgctgcttggtagacttcatcgtcactagcatctggattaccaaagcgaatattatccatgattgtcccagtaaacatgtgcgtatcctgcaaaacaattgcaacggacttacgcaaatcatctttcttgatatccttaacatcgataccatcgtaggtaatactaccactatttatttcataaaaacgattaatcatattagaaatagtagttttaccagcaccggtttcaccaactaaggcaactttcataccaggtttagcatcaatgttaatatcataaagaatttgcttatttggaacatagccaaaatcaacatgatcaaacttgatatgccccttaactggaactaattcattatttgctttacgccaattccaagcatttttgacgccagttttatgagtgatagtaacgcgaccttcatcaacttcagtagctttatcaagtacattaaagattcggttagcaccagccattgccattacaattgagtttaattgttgggaaatttgagcaattggcatactgaatgaacgtgataattgtaaaaatgaagcaattgcacccaaagttaatgggaagaagccattaattgcacctaaaccaccaattaaggcaattaaaacgtatgagatattcccaacgttacccataattgggaagagcactgtcgcataaacattggctaaaccagatgcttgacgcaattcatcattatatttatcaaaatcgttcttaacgtatggttcatgactaaagaccttaattacctttaacccgctgagcatttcctcattataaccattcattgcacctaatttttcttgttgcaacttgaaataatgaccagactttttagttaagtaacgaacaattccaactgataataagaaaataactaaagtcaaaattgttaattgccaacttaaaactaacatcgaacctaatacgaaaacaatagtcaaagttgaactcacaaattgaggtattgactgtgatatcatctgcatcaaggtatcaatatcattagtataacgcgacataatgtcgccatattcattttgatcaaaatatgcaattggtaaatattgcatatgtttaaacatcttatctctgatactcttttgcactttttgagctaagaccatcatcaataaggtatacagataagtcgtggctaccccaattaaataaactaatgctaaaaagccaagcgcattaaacaaaggggtaaaattaggattagcctgcttaagtaaaggcgtaatatatttatcaattaattgttgaataaataatgaaccataaactgtactaaaggcactgacaatgattccaataattgctaatggaaaagctaccggtccagtttttacaatatacttaagtaatcgccaaaacgtatgcttttgattttgatttttcatctactcacctacttttctttttcagattgatacttgttaagtgaactatataggtcgttacgttcaataagttcatcgtgagtgccgatatcttcaattcgaccatgattcatcacaataattcgatcagcatctttaattgaaacaattctttgcgaaatgataatcttggtagtatttggcatatcacgcttcaaagccaaacgaatttctttttcggttttagtatcaacagctgaagttgaatcatccaaaattaagatttttggcttctttagtaaggcacgcgcaattgtaattctttgcttttgaccaccagatacattgttaccaccttgttcaatcatagtgtcatatccatctgggaattcattgataaagccatctgcatgagccaccttagctgctgcaataatttcttcatcactcgcattttcattaccccatcttaagttatctttgatagagccagaaaataaaacattgttttgtaaaaccatggccacattatcacgcaaagtctttaaatcatatgaacgaacgttgtgaccagcaactcttacagcaccaccagtgacatcataaagccgtggaatcatcgctactaaagtagattttgaagaaccagtttcaccaataatcccaatagtttcacctgaatgaatatgtaagttaatatcagacaaggctaaaacgtcactatctttttcatacttaaagttagcatgatcaaatacgatatcaccattagtcaagtcagtaactgggtgctgcgttggctgagtaatggttgatttttcctcaattacttcagtaattcttttaccactggcttgagagggtaaaaatcattgataaaatcatcaaactgaagagcactgagtttgaatatgaaaacattgataccaactgtccagtttgcatttcatgtcccacgatcaatttggcaccaaaccatgaaagtagaagcattgagccgtttaataataacatcataactggtgcatttaatgcaataatcttttgtgcaccagaaaagagtttgtaaatcatatttgatgattcagaaaacttatcaatttgctcttgctcatgcacataagttttaacttctctaaccccacgaacattttcacgaacggtttgattcaacttatcatagtttttaaaaatcttgggaaagaatggaaatgcattcttaataatcaaagccaataagatagccataattggcgcaataattacaaattgaattgcaagtttggcattaacaacaaaggccataacaattgaaacaatcaacatcagtggagctctaacagcaattctaattaccatttgataggccaattgaatattgttaatatctgtcgttagacgcgttactaaactagaacttgaaaatttatcaatattttcaaaagagaagttttgcgtattataaaacatatcttttcgcaagttggccgcaaagccagctgctgctttagctgagaagtaacttgcaccaataccaaacattaaagagataaaagccattaataataagaatagccctaatttagttattaatgaagtattccccttcataataccgtcatcaattagccatgccataacgtaaggaataaacatttcgatgaaaacttcgacagttacgaatatcggcgaaagaatcgattctttacgatattggcgaattgacttcatcaaggtcttaatcatatttgatcctcttttcaatatatttttttatatacagattagtgtaccgcggtatactttttagctctaaactaaagaaagaaggcataaagccttcttcctaaaatatccgcttataagaaaatgattttctcaaaacttacactatttacttttttaatagattatccttttatttaataaaagtcaaataatttactctttatctactttaggatttaaaacacttgttgtaatattgtatttttttctaaataaatacctagctccataaacaagtgctgccagtaccaaattagcccaggcagggagaacaggattaatgatttgaaatgctttacttgaaaaaatagtaattactacgaataaaacagctaccattgcaattgtcaataatgctatctttccaaattttgcttttccacctgctaccaacacatcagtataataagtcatcaaagttcctaaaatcgctgcaattgcaactaatgtcaacaaaccatactgtgaattatattggttcttagcaccagcagttaaagccataatagaaatcattgcagtaaagactacaaagtataataaacctgaatcaacagctctcatccaatatttaggctttttaggcttaataactggatgcaaaatttcttctgcttttaaaattggtgatttcttatacaagttacttgcgggaataccttgcttttgggcagttatgatttcatccaataaatcattggctatttttgtagcttcagcttcgctcttaccagcatccattaatgctttttctaaacgaaatacataatcactatttttgttagttaattgcttgcgcatgctatctacatcttgtattacactactagtttgcttttctactttagcttgagaagcttcttgcttttgggtattagctaagtttttttctcttgtatccatttatttccccttagacattaaatctaaattcaataatgtcgccatcttgaacaacataatcttttccttctaagcgcaagcgtcccgcttctttaaccttttgcatactttcatatttgtctaagtcatcaaatgatacaacttcggcacgaataaatccacgttcaaagtcagagtgaataacaccagcaacttgtggagccttcattccttcatggaaagtccaagcacgtgtttcagggccaccagctgtaaagaaagttctcaatccaagtaaatgatatgcagccttgattaaacggtctaagccagattcagtaacaccttctgcttctaagaattcttgcttttcatcatcatctaaaccagctatttcttcttctgtagctgcactaatcgcaattgcaccaacattttcactttcagcatgttttttaacaatttggaagtatttatcactttcaggatctgccattgaatcttcagcaatattagccacatagattactggctttgaggtaagtaaaaataaccctttaacgattttcttttcatcatctttgaagtcaatgcttcttacagcttttccttcttcaagaactggcttaatcttttcaagaacagcaagttcagctttagcatctttatcgttacctttaactaacttttcaaccttaccaattcttcgatttactgcatctaaatctgcaatggcaagctccaaattaattgtattaatatcttcttctggatcaactttaccagttacagatgtaatattatcgtcatcaaaagaacgaacaacatggataatagcatcagtttgacgaatattttctaagaatttgttacccagtccttctccttttgaagcgcctttaaccaatcctgcaatatcagtaaattcaaaagtagtatgaacaatctttttagctggaattaattcatcaattcttgctaaacgaggatctggaacttcaaccattccaacattgggttcaattgttgcaaatgggtagttggccatttcagcaccagctttggtaatagcattaaataaagtggacttaccaacatttggtaatcctacgattccggcagttaatgacattcttttttctctctttcttataaaaatcacttaggtatagcaatattttctttaggaaggtaatgctccaattttttattaactggatcattagctttggtcagaattttcttaagtcttttgttaaagtctgctcgtggcatcatcaaaatatgaccacatcccatacacttaaggcgaatatctgcacctaaacgtaaaacttcccaattattaacctgacaagcatgtggcttttttaaaagtacagtatcagctaattgatatgccaattttgtatcagtcatctaaatcaattcctaacattgtcaaaattctattcaaatcatcagttgaattaaagtcaattgataaatggcctttaccttttttactttcagaaattgaaacaggacttccaaattttgtagataatctactttcacttgctcgaataaaagcagactttcttatcttatcactcttagaaactttattagctttttcattcattgcactaactaaaacttctaattttctaactggaattccttctttaacaacttttttagctaaatcatcaattttctctttatcttttaaccctaataaggttctagcttgtcccattgataattcaccatgttgcaaaagttttttagcttttttaggcaaagttaatagacgtaagtaattagctatataagggcgagatttccccattcttttagaaacttcttcttgagttaatcccaaattcttttgaagcatttcataagcttgagcttcttctaaaggggataaatcttcacgctgtaaattttcaagcactgcaacttccatcatttgagcttcatcaaagtctcgaatgatagcagggattgttgattttttagctagtttagaagctctaaatctccgttcaccagcaataatttcatagccatctaaacttttacgaacaataattggctgaaaaacaccattctccttaattgagtcagataactcttttaagctcttatcatcaaagttctttcttggctgatatggattaggccgaatgtcttctaggcttaattcttcaacttcttctgtaccatccacactttgtactatttgagttggagtatcttcaaataaggcttctattccgcgcccaaggccacctttttttcgtagttcattatttcttgagtctcttgccatgagcttttagcacctctctagctaaatcatcatacaactttgcaccacgcgacttaggatcatattcagtaattggctcaccataacttggagcttcagccaatttagtgattcgcggaataatagttttataaacttttttactaaaatatgactgtacttctttaactacttcagcccctaagtttgtccgtgcatcaagcattgtcaaaagtacgccttcaacatctaaatccttattaaagtgtttttgaactaagcggatagtattaagaagttggcttaatccttccattgcatagtattcactttgtactggaattaaaattgaatcactagcagtaaaggcattaattgaaagctggccaagtgaaggcgggcaatcaataaaagcaaaatcgtaatcatttgctacttgatcaagtgcagatttcaaccgagtttctctggccatcatactaatcaattcagtttctgcgcctgataaattaattgtagctggagcaatatctaaatttttggtacttgtatgatgaatagtatcagttatcggaatctcatcaactaatacattataaatgtcttgatggatagtcgatttttctattcctaatccacttgttgcatttccctgaggatcaatgtcaataattaagacccgatatcctctattcgcaatacttgcagccaaattaatagttgtagttgttttaccaactccacctttttggtttgcaattgaaataatattgaccatcaattacataccctactttctgtgtaattcaattgttattttatacccatcatctgttttttcttcatgggattttacttgtataccagaatcctttgctaatttaacagcttgcttaatggtattaatttgaacttttaaatccttggctgtttttacaacccgctttttctcaggttcttttttagctggctttttaacttcttcagcttttttagcaaagtaaccatctacatcttcgcaaattgcttcggtttctttaacacttaatttcttttgtaatatttcatgcaaaacatgtgactgttcaactggtgttaatcctaacattgcccgaccatgacgagccgtaatagtaccagatacaagatatgactgtacttctggttccagcttaagtaaacgtaacttattagcgatgtaagattgtgatttccccatatcttttgctaaagccgtttgcgttaactcatttaatttcattaagtcttcataagctcgagcttcatcaattggattaagattttcacgttgtaagttttcaattaaggccaaactagcagctttttgatcatccatattttgaacaattgctggaatagtagtccaattaagactttttgctgcacgaaaacggcgttcaccagcaataatttcatagttatcacctttttctcttacaacaatcggttgaagtaaaccctcttgctccaatgtttgggctaattgttcaattgatgcttcagagaattcatgtcttggttgataacgattaggaataattttacttaattctaaatcttgaatttgtttttcttttggaatttcgtttttcttagaaaaaaagaatgccactgttcaattcctccattaatgaagtggcttgcggttaggtgtgcccgcttgccgaggatattttttcggagtttgttttactttatttagtaaaattaaagtccgttcttcatcagattcaggtaattgtaaactcttagttgcagttatttgcccaccaagaactgcaattgcttttttagcatctgctaactcagactctgcttttggtcctttaagtgccaagaattgaccaccttttttaactaaaggaagacaatattcgctcaaagtagccatattagcaactgctctagccgttactaaatcaaatttttcacgatatttttcattttgaccaacatcttctgcacgaccatgaattaattccacttgttctaaatctaaatctgctgttaaatcagctagaaatttcaatcttttattaagtgaatcaacaattgctaattgcatttctgggaccagaatcttaataggaatagatggaaaaccagctccagctccaacatcacaaatatgtccttttttaaaaagatctggatattctaaaaaaggtgttaaactatcgtaaaaatgttttaaatagacttcctctaaatccgtaattctggttaagttaacatattcattaacttcgatcagctttttatagtacttagaaaattgatcaatctgtttttgatttaaagcaaagcctttttcagctaattgcttaatgaaaagttcaggcttcatttaccctccatgattttgtttcacactaatcaatttactgcgaaatcatacttttagcaaaaaaatatttttgttactcatccaattatgaattaaattttgctaatcgtcaaagcatgaaacaatatcatttttaaaaattttaatctataatagagccttaaaaggagatctaaaatgattgttactatattagttttactttatttaggatggcaaacatataaaggttttcaaatcggttttactcgaaaaatcgtaaatttaatattatcagctgtattcttctcattagctattattttacaaaatccacttggtaattttctttatagtcaatatagtggacaaagcaccacaactgcttcaaatcaaatggaattaatggctgctcgttttattgcctttttcattattttttatgcaagcaaacatataaaaaagatgtttagcaaatggctaccaactaaaaagaatgagaaaaattttagctcattacttgatggtacattgggagctttagcatcattaattgcagcttacttatttgtttatgtgattttatcaatgtgcaatgctcttcaaaatcaatggtttattcagcaaactgttgattcaccatttctccatttcattatttatcaaactcctggtctatctaacggtgtcttcaataatctattcagtatcggaaaaactgccggataataaaaagaagtagcaaacgctacttctttttatttaccatcaaagccttcatagattacttcttcattttgataaacaaaaaccgcaccaattcgattttcattcagccaattagtaactggctttccagcaaagaataatcttttacattcaatttctgcatctacgctatttttagtaaatgtagttacacctgctagcttcgtttctaccggataacctgttctaggatcaattaaatggtgatatttatgtccatttacctctaaatagcgttcataaattccactagtaacggccgagcattcagaaaccattacactagtaatattttttcctctcttttcaattggatcttgaactcctaatgaccacttaccacttaagcgtttaggacttggtccaacaaataaaacatttcctcctaaattaataatccccgctaatacaccgaaactccgccattgatcacgaattctatcagcaatccagcctttagcaatacctcctaagtcaagttccattcctttttcttccaaaaagacagtttgctgtttatcatccaatactactttttggggatcaattaatttcattttttcatctatttcagattggcttggaactcgtgcccctttaaagccaatatgccataattttacaactggaccaattaaggcattaaatccaaaattttctaaacttttttctacagcaagctttactaaactataagttgcgctagaaacttgaaccggatgaagcccagctgcatggttaatatccataacttcacttttatctcgatttacagtgaaaagatcttcataataatcaattaatttaacactttgatctaatatccaagtttgatctgtgccaaataactgtaaagttattgatgttcctaatgcatggtgttttttaacaacttgatgagttgcaaggtcttcaatcataataaactacctcaatttattctaaatacaactttctaagcaagttaattaattcatcactaactaataattgatttttgatatatgaatcaatgccaccatattcttcacacatcgtaataatcgcattatctaaatattcatcagctactgaaccaagtgagcgtaaatttgctctaaaagctaaactactacctttttcttttgcctctaagtcacgtttagcccgataatcattgagcatataatttgagaaaaggtaatcttgtctaatagtttctaaatcaacacctaaaatatacaagatgaaaaaggttgttaatccagtcctatcctttccttcagagcagtgaaaaataatcgctccttcaggagtatttgccatctcttctaaaatactatgaaaagcacgttgactatgagggcgggtaatcattagacgataattttctctcatgtgttcaaaggcagctattgaattatcatcaaattttttaaataagtcttcaaaacttgttcctgcctcagtattatcttctggagatattgagatattaaaatgcttagtccctgaaataaacgtatctggatcttgtttacgctctttttctgaacgtaaatcaattacttttcttaatccataattaattaagtattgttgatcatgcttagataagttacaaattctcccggttctaagtaatctttgcatttttactttatgaccgtcttttgtcacatatcctcctaaatcacgaggattacgaattgtttttagtggtaaaacttttgcctgcacaaatattctccttcgaaagtaaaaccggatagttgtctacccggtaattctacacttgatttagcttattataaaatatttagtttcagtaaaaagcagctatttaaaaagaatcatttgatttgaaccaattatatccagtaatggtaaatcaaaatctgctacttttccaacaatattcacacgcttatcttctggtaaatcttttttggcaatttctaattctccttcatagcgtaaatactgttcattatcactagtaattataccctttgatctttttccagcttgcaatttagcttgtgaaaataattgtctactcctaccttcttctaatctaataacatctcttgataaatctgctctctgatgccaagaatgcttaactaattgttcagttatgttattattttctgttaaatgaagtagaatagcctttttatttaaatactctgaaaattgatcaaaactttcattgcttaaatcacaatctccaataaagacataatctaatcccatcttaaataaagcaagactggcaaaaaagctacttacattacgatgctcctctaaagtaggtaagctttcaaaaataggcgctctcttgattccatcacctggagcaaaagccataactttaaagccataactttttagccatttattacgttcaatcatccattcacgatctaatccggtattaggacgaggataataattatgccaagcttctaaatggtcaaaatccgcctgattttcacgcagactaataacatcttcttcgctaattgtgctagcatttaaagctactctgaactctttagatatcttagctatttcatcgttatcaaagcctgcatcaattctaacaccagtcagtcccaaactttttaaactagtaagatctgcttctaatcctagttttttcataccagctttagaaatatcccctactaactctaagcccaaatcgtgacaccatttctttaattcagttaatccctttaagacttgatcactatcttgctcaggagcctgtaaagaagtaaatattcctttaaaaccaacatttctcatttttaaaatataattatgggtttgagctgtcaaaggctcacctagattgattgaaaatcctagcatttctcgctccaaattagatactcttttaataattttagtctagacctttattgccataaaaaaaagacctacaagctatgaaaataacttgtaggctcttttcataaagtattctatttttgactttgagcaacaaacttaataaagttttccatcacaatatcaagttgatcaatataggattgattaattaagtcaccagtttccttatcaaaattatctgctgctctacctattagaacttcattacctggtaaaacatttgcactcatatcaggagctaataatatttctctggcttcttcttgtgcacgagctgctcccatcattccataggaagtccctactaccattgctggcttcatattcattaagtcagctccagagtgggaacctaaccactccaatgcactctttaaagctgcaggaatagcatgatcatattctggtgttgtcaaaataattccatcagctgactttactttttcacgccaattttcgacattttcatccccagaactttcccggttaaataaaggaagggtattaatttctgcaacttcaatttctgctttatcgccgtatcttttagcgatatatttagctaaaaagcgattaaatgaaaagtcagcatttgtccctactacagctagtaatttcatcaaaatagcctcctatttcgtaatttgttcataccattcttcaacttcgccaaagaaatgatctagaaattcaagcgtccgttcatctttaatttcaccatcttcattaaaagcctttgaggcaagaccaagcataaattcatccccgttaaatactgggcatgaaaagccaggtgctgctaatatatttttcaaacgcgtctgtgaacggccagaaccttgagcaagtggagaagttcccacaataaatacaggcttccccttaaacggatgaaggtttgaagataaccattcaagtgcgctttttaaagcgctagtcacagaatgttgttgttctggtgatccaattaatactaaatcagctgcttcaattttattagctaagtcactaacaacttgaggtgtatcttggccttctttatacaaaggtaaatctttaatttcagcaagttcaatattgtgcatagtaaatctattttttatagcaagtagtaacttacgattataagaattttctgcattactaccaacaatagcaaggattttcataaaaaaaccacctttccagaaatctatattacttattatagtgttaatttgcttatataaacaataaaaataaggggccgttaatataaacgctccctattattctttatcacttgtagaaaacataggattattttctacttgagatagattttcattatcaatagcatctaaaatctgtgcttttaagacgttaacaatttgctcttcactgaatgtagcaacttgattaataattaatgccgcaattccagttgcagaaatccagttggtcattaccacttgcttggttttcttttcacttaagttatacttgctatattcttcattaaatttttcaattcccaaatttaacaaagtatcagcaataatagcacttccgagctttccatcaacaaacattgctctaaataaatcaacatgttctttagcaaagttaatataagaaagatccaaatcaattaaagctccacctgtataactcttttgcaaaatcttagtctttaagtttacagagatgatttctaaaacctgagttcgtaaatcctccatatttttaaattcaagataaataggttgggttgaaaagtcaccggcttgagcaatgtttctcgcagttaagctttctattccttcacttaatgccagattatacgccacatctaaaatttgttgacggcgaatttctttttttctagccatagaataaccccaattaaataacgtttatgtagaaaattttatattatatataaaaattatattgctatttagttattttcgctagtaaattggtcgtatccattagaaatcatttcaacaatttcttctttagataagccttcactaattgcatatgataaaaaagaagccgacaaaatgtagccacgttctccttcatcagtcaagttgtcagagaagtctatgttaatactactattagcataatctgtagttaaagttatttttttatcttccattttgaagtcctctcttttcataaatactaattaaaacttataatagattataatataacatttaatgaaagtgtgactaatatgattacaaaacatggtcgttctgcttgtacttcaattttaatcggaaaaaaagcttcaattaatggtagtgttattatcggtcgtaacgaagactgtaaaactgcctggcctaaacatttaaaatttaatcctgcggcaatctgtgctcacagtcatttttcttcaaatgacaataactttgaaatggacttaccagataaaagttatgcttactcaagtacgcctgaatggactgataaatatggtgtttttgaggaagatggtattaatgaataccatgtagcaatgagtgctactgaatcagcatatgccaatggacgtgtattagcagttgatccttttgatacagaaaaaggaatactagaagaagctatggttacttgcgttttaccttatattaaaacagcccgtgaaggggttgaaagattaggtaaaattgttacagaacatggagcagctgaagcagatggcattttatttgccgatcctgatgaagcttggtacttagaaatcggttcaggacatcattatgtagcacaacgtattcctgatgattcttatgctgtagtatctaatcaacttgctattcaagaagtagatttcactgatcacttaaactttattttttcaccagatttacaaaattttgtgtatcaaaataatctttggcctaaagacagaacttttaactttagagaaatttttggaacgcaagacgattcagacttgcactataatactccaagagtatgggctgggcaaaaattattgacaccatcaaaaaagaaggaaccccaagacttttatttaccatttttggaaaagcctgatcgtccaattaccattcaagatgcacaaagagtactaaaagatcactatcaaaacacaccatttgatttaacaaacaagaaaaatagttcaaatgctacatttagacctattagcgttgctaccactcaagaaagtcacctacttgaactcaatggtgaaaatatgattcagtggctttgtatggggattacttctcaaggagtttacattccattttacccacaaggcactaaaactcctgctatgtgggataaaggaactgaaacatactcaagtgattctgcatattgggtatttaaattagctagcgtgttagcggatcgtgattggggtaaatacggtaaagacttgtctacaactcaagataataccagtaaagagcttatgcaaattcgtcatgaatacgatcaaaaactattgtctgttagtgaccgtgaaaaagaaattgaattagttgacgaagcgaatgaaaaaatggccaacctagcagttcaaaattatcaagctttaattgcccaattaattaccaaacagactgccctctcacctcttagctttactatggatccaaatttataatagcttaaatcaaaaacaggtctggaaacccagacctgttttattttctttttgttaaatttccatcaagcatatcataaatatgatcacaataagcctctaagcgttgatcgtgcgtaactaaaatcacagcttttccctgctttttagctaattttttaaataaggctcctacttctttaactctctcgctatcaagtgaagccgttggttcatcagctaaaatcacttgtggattagcatataaagctctagcaatagctactctttgcatttgaccaccagaaagctcattaggatacttattaagcaattgttcaattcctagtagtttaactaaatcagctaattcatcagatgataaattccctgtcttttttacacgattaactaattcaaattgttctttaacctttaaaaaaggtactaaattataagcttgtagaacaaagccaattttatttaaacgtagattatctctttgcttatcactaaattcagtaacattttctccattaaataaaattgttccgctacttgccttttgcaagctgcccataatagttagcaaagttgactttcctgcaccactaggaccttctagtaatactacttcacctttttcagcttcaaagtccactccttttaaagcaattgtttgtgcattacctgaaccataaatctttttgatattctttaattcaattgtactcatcatttaacccccaattgccattgttggatcaactttcaagatactccgtacaggaatcaaactaccaataacccccataatcaacattcctaacaatccagctattgcgatagttggagaaaattgcattggaacagctgctggtaaagttaatactgttaattccattaaaactaatgccaacaagctagcaaataaaactaatataaatgattgactaacagtaaacccaatcaaagttttacttggaattccttgcgctctcattactgcaaaattaggcaatttttgcatggttaaaatgtataagaataccgcaacaatgattaatgaaattataaacaaaaatccaatcattaaaccaaaagtcagattttgtgcgctataacctggtaatttattcacaaaagtttttacgctatatgtttttacatttttgctattgactttaaaatcactttttttagaaattatgccactagcaacaatttcattatttacactacgcaatttacgccaggttgctaaatttccatagataattggagcaatattaatcattgcatttttagtaaaacctacaattttatatttatcagttgaaccattaagagttaatttatcacctaatttataacccttatttttaagtatttggctaactacaacttcatttttacttttggcttttcgaccacttgtaattaccaaattcttataaatgtactggcttgcttttattccaacaaattgagctgatattgttgctttctttttattttttataactaatggagtctgtcccacaagtgcttcattagtagataacttatttggtatatcttgcttagtcaataatgattggctcaaactaatattactattctgatttaaaactacttttctagtttgccaagcataaatagcttgtgtattttcagaagccaatccaaaagctagaccacttagtataaaaatcaaataactgattaaaaaaatcataaaaacaatcagaccatatctgagtttttctttttttatttctttaaaagctaaatacatagctacccttcctcatctaacaactctaaactatgtttaaaacgttcaagatagatatttttgtgatcaggatcaaataaaacgagtttaatagtttcatgactcaataccatcgctgaccaagttttagcatcgagattttttaatcttattgccttttgtttaaaatcaggagttaacattacttcatttttacttaaatggagctttataaaagccaaatatggactttgctctgatttacccacaaaatcagctgtcatttggtagagtaattctacatcaaaggccttacttggtcttaagcctgtatgaatatctttcatcactaactgatatacatattcatatgcatcagttaaatcatcaaaatatttgtaaaaagctccccgagctattccactacttttaacaattctcgctacctgagcatcagctaatgaataagagctaaattcatcaattagtgcttcagttactcgcttcttttttccttgattcaaattttgaaaagtcgactttaccatatcttttactctttctataatgtgacattgtgtcacttacaaatattattttacacttttgtgacactgtgtcaacattctaacataaaaaaagagcactatgctcttttttctttatttaagtggaaaaatcttatctggattaattattccatttggatcaaaaatactttttacttttctaagtaaattagtatagtctttaccataaaaatcttcatagtaatcttttctagcataaccaacaccatgctctcctgatatatttccatcattatcccgagcaactttatataactcgctaataacgatatgtgatttctttgcgaactcttcatcatccatttcatctgagcaaagataaatatgtaagttaccatcccctgcatgaccaaaattaggaatccgcattttctcttcttgttctaactcctcaattcgcttcaatactaatggaattcgatcaattggtactgatacatcaacttcatccattttaggtgttgatttttggattgccaacagtaaggcttctcttgctttccaaattaactctgcttctttactagtagcatctaatacaattggcttcatagcatgatattcagctgttgctgcaatggcctcttttaattgtgcatgaagttcttcatctgtaaatgcatctaatccgataataatgaagccatcaccatctttaattggaaaagtttcatcatatgctttttcccataattgcaaaacttttcttcccataaattcaacagtcgttggtacaactcctgaagctaaaatcttaggaacagatttaatggcattttctaaagtatcaaaaggaataatcgcatttatcacttttttaggtttaggatataagcgaattgttatttcagtaataacacctagtgtaccttcactaccaataattaaatcttttaaactatatcctgaagaagatttaactgacttagaaccaaatttataaatctttccatcagttaaggcaactttaacttcacgaatatgctctctagttacaccatacttaatagcttttaaaccacctgcattagtagcaacattaccaccaatagttgcccaatgcatggctggagctggcatatatgtaaaaggtttatcggacaaatatttttctaggtcattcaaacgcagccccggttgaacagtcatagtcaatgaatcaggatcataatctaggacttgattcatcttaaccatatctaaactaataccaccatgaacggtcaagtttgctcccatcaagccagtcgaattacctctaggaactaacggaatcttatgatcacttgcatatttaactacttttgcaacttcttcacttgttattggttgaattactaaatcaggcattgcccttacaactttaaattggtcatgatcccaatgttctgttggcacggtaataaatcgctctgaatcactaatgaattcacttaagttttcaatatcacttttagttaatttgttatacgtacacataataagtctccttgtaaacttataaactactttagtttaattttaccggctttttgaaagcgctgtcaattaattgatacaaaaaaggaagcactagcttccttagtttacttaatataaaacctgattataacaaataactttagagaaattttcagtcatctcaaattcgctaattgcacaattagctacttgctcaaaaacacctaagtttccattagagaaataatgagctactaaagtcttaattaatgttccatgacatactactaaaatatttttatctggatatttatgaatcaattcatcgataaattcacttccgcgactagcaacctcttcaaaactttctccacctggagcatatcttaaatatccattagctacatagccgtcttcattaaatcctttaggatattcctttattaactcatcaacttttaatgtgtcccattcaccaaagtccatttccttaattcgatcatcaaaataaatttgcttttgtcctttaacaaatatttctgcagttttttttgctctttttaatggacttgaaaatactaaatcatatttttgtggatcaaaatgactagcagccacttctgcctgattaattccagtttcatttaatggctgatcaattcctccaccttgaatccgattatctttatttaaatcggtttgtccatgtctaataaatgttaatttcatcttatttcctttctaagttgatactattaaaactaaaagcgctaaaataaagttataaagagaaggaggggctataatgtcaattttcacaattcaacgtgatggcttaaatttagtctgcgaacgcgaaaatccttttggtgaaaaatacgatttggcagttattatgcatggatttacagctaatcgtaatactgccctaattaaagaaatcgtaaataaactacgtgatgaaaatgtcgctagcattagatttgactttaatgggcatggagatagtgatggtgcctttgaaaatatgactgtatggaatgaaattgaagatgctaatgcaatactgtcatacgtaaaatctgatcctcatgttaatcatatttatttggttggccactctcaaggtggagtagtagcatctatgctggctgggctttatcccgatttaataaagaagttagttctgctagctcctgccgcttgcctaaaagatgatgcattaaaaggaaatactcgaggagtatcttataatccaaaaaagattccagattctattccctttaaaaacagaaatttaggtggtttttacttacgtgttgctcaaaatcttccaatttatgacatagctaaaaattataccggtccggttagcttaattcatggaactaatgaccaaatagtccctgctaaatatattgaaaaataccaagctatttatcaaaatagtgaattacattttataaatggggccgatcatcgctttagtgacacataccaagctatggccagtgatttgactgctgactttttaaaacctgactttaatgccttttaaaatcatactgagttttaaaaatatatttatcagcacttgaagttagttcatcaaatttataatcaaaatcattaaacgcttgaagttcttcaggcgtttttatttgattttcgctaatccaacgtaccatttctccacgactcatcttggcatgagtcccaatcattttccattgatcttttcttttttctaaaaaatcaatagttataaatctctctccttcatgtaaatatggtgtaacagctttagcatactctttagaagccaaattaatcactgtatcatcatcttcaaataatttatcatgaatcaaactatcccaaaaatgatacaaactgtaatctttaaaacctaccagcttattttttagttctaggcgataaggactaactgcatcaaaaggacgtaaaactccatatagaccagaaagaattcgcaagtttttttgtatataaattaaggcaggttcagtaaataaatcaggagccatatactgatattgaatcccgccataagaaataattgctggagtttgggctttttctaagtccatatttttcagctgcattattccttcttgaacaatcttatcgctcgcttcccaaatttgctttaatctacctgcttcttgattctttaaaaaatcagctaaaatctcagcttgctcgagaaagtctggcctagttttcgccaaaaagctttcttggttaacaatcatttttttagctggtgaaataatagttttcatattactatctttcctttttaaatatatagagaaagctaaaatttctccttactgcaattatacggtaaaatataaatgaatacctaagggagggcttaaaaagtgaatccagattatggaattattttaaatttcaaagtaaacgccaatgctaatgcgcaaaagttggtacgtttagcaagaaacatcggtgctcgcgctattagcgttgaaggtgctgaagacctcgcgccatataaagaagcttgcaaagactatacagttgaactggttaatgcacatggaattgatttagaaagtgccaatgtcattaatgacttaatcaatttcaagcgtaatgggcagcatgccgttttcaatgtagaactggacgagatgggcgatttgctcgataatcaaaaaacagcattaactttacttaatgactggatgcactggttcggtcatgcctataacgaaagtactgagagcagcttaaaaacaactgcttccaactctttcgtttgtgaaaatcgtcatgcatcatatcaagtatacgtctttattaaatcaccactacctgaaactattacagttagtggctttgagcaagaacctatgagaattgaatggattgatgaaagagctgaattatcttttgactttcaagataatgcagccaaaattgaactgtcaccttatccagaaggtatcgattataaatggcgagttttacgaattatgaaacatcgtcctgaagatgacattaaagaaacacaattttagacaaaaaaagaagcgctaatgcgcttctttttattcttctacaaataaacttttaacaacttggttaaccttaactttttcagcttcaactaagtcaactctagttccaataactttggtatccatcttgatttcacgagttaacattggttgatcaagcttaggttcaaagaaggccttaaattcttcaagacgtttagctgtcttaaagtttctagcaattactgttatgaaagtagtaaattccatatcaccaccaacagtcttatcaagccatgcccattcgtctctaatccaatcccaagcgagttgttcaccaagcttgttgttcaagacacttgcaaaccaaccacgtaagtcttgtggcttaacaacgtcagcgttcttaaagtaagatacaactttttcaagttcactttcactcttagatgaagtaattgcagctgttaagtcgctcttgaagctggcatcactcgtagtttggtaaagcttaattaacttatcagtcaattcgcttgaaccacagttcttaacttcattaatcaaaacatatggacgaacatccgcgtttaagctttctaggtcatcttcatgttcttggtaaagtttgtgagctgcacgaactgaatcaatattgccaccataaagactagcacttaaaacgtatggacgagttaacttgtcttcatcgctttctccagctttaacttcccaacctaaacgcttaacttggtcttcacttaagcggttgtagaattgcttcaagtagttttcagcatctgaatctggagttacaaattgacgtaactttctagcagtagtgtaaatagcgttatttacaaggtttgacttagaatccttaagcttatcaagtaaaggaacaacttcagcatatgaactttcgcgaccttcactgagtaaacgtaaatcttgtagtaattgcaacttactaattgagtctaaatcttctacttctgctaagatatcattcatcaaagtttcgtcgtatttaacaacgcagtgagtagtgttaccaacattaattcttaatgcatgaccagcttgcttacgtaaagtttcgtagtcgcctaaatctaattctttttcagtcatgatagctggtgaatcaaagttagcattcaatggaatttgccaaattcggcccttatcttcgccttcaccaacaaagaattgcttttgtgtcaacttcaagtggccatcttcaacaaaagcattcactacaggataacctggttggttaagccatgagtgcataatttcagcaatgtttaagtcagttgcagttgataaagcattccacaagtcatccccagtagtattaccaaacttatggtggtcaaagtaatacttaagtcccttttgtaaggccttatcgcctaaaagagctctaaccattactaacattctagaacccttagcataaacgattgcaccatcaaataaagtatcgatttctgctggatcttttacttcaacataaactgattgaacaccatcagttgcatcccgagttaaagcagctggagcttctgaagattggaacatttcccaaacattccagcttggttcaagatggtcaagtgataaatattccatcatgttagcaaaactttcgttaagccataagttgtcccaccacttcatagttactaagtcaccaaaccattggtgagcaagttcgtgcgtaattacagttgccactaacttcttcatgtcaagtggagtgttgtctggatcaagcaacaagtaagcttcacggtaagttaccaatccccagttttccatcgcaccagcactaaagtcaggtaaagctaattgccatgaatgtggcaatggatatggagtttggtagaagtcttcataaaattcaattgcgcgcttagcaatatctaaagcaaagtctaattctttagccttgtgagccttagtagcaaagacacctacttttactccactcttagtttcagtcatcttagattgcaaatcaccaaaggcaaatgcaactaagtaagttgacatcttaacagtcttttcaaaatagtgtacaccattttccactttagtttctggcatgttagccaaagcaatttcgccaggcttttcatcgaatttaagtgctaaactaaaagtggctttagcttctggttcgtcaatacatggaaatgcttgacgagcaaaagtagtttcaaattgagtaccaataatttcttcttttttaccatttaactggtagtatgaaggataaatacccatcattgtatcagtaagtggtgcactgtaatcaatactaatagttgtattgccagctttagctaatgtaattttaattgcttcagccttttgatctacttcaaaaggtactgcttcaccatcttgagttaccttactaatactcataaatttttggtgaacattaacttctttatttaaagcttcaccagtaatagttgaagtaccattaatttttttatcggcccgatttacattaatgaataaatcataatgatttgggtgaaatgtatcataaaagcgattgatttttcccattattttttctccttaacttaataaaaagctattacttagataataccaaaaaagtgcaacattttagcaatagtttgctttttttgataaaatatatacaaatttaaataggtggcgaaaaagattttgactggaaaacattcaaaaactgtagctgataattggtttaagaataacaaagtacttattacacttttttctgcaattatccttctatctttagctggtggatttatttaccacaatcacttagaagctcagcgtcaagctacattacgatacacaagtaaacactttaataaaaacgttaaaatatttggtatcaaagttggtggtttaacaatcaatcaagctgttactaagatcaataaaaatgcgaaaacagctgcaacaatgactgatggaaaaatcactagtatgaaattagatggagtacaagtaacagataaaaaagaaattactaagtacttcaaaaagcaacacactgcttttccatctgacaaaaaatggaattttgcggatagcactttaaaagaagcaaaaaagaaattagctaatttttataatgctaaaacaacatacaaagttggcggaaaaactttcacacttgaagctaaaaaattatttaaaacagttaggtactatggtggacaattccacttcactgatacttctactttgtccgctaaattggcaaaaatcaattctgaagtatctactttagataaatcatattcatttacaacccctaacggaagtacgattaatgtcactaataagtcatatggttgggctattaataataaaacagccattcctgctattgaaaaagctttaggtagtgatacagctactgtagatggtgctaattacatttacggtaaaggctatagtacctacggaacaggttataccacaataaataatggtcttggtaaaaattacgtagttgtttctattaaagaacaaaaattatgggtaattaagaatggctctgtagctgtaaccttgaatgatgttgtaactggaacagcgcaaactagttctggttcttctgatgctactccaactggtgtttggtatatcgaatataaacaatcaccaagtatcttaaggggtactaatgatgatggctcgagttattcatcaaaagtaaattactggatgccatttactttaactggttgtggattacacgatgccagctggagaactgattggtcaaagactgcatatctaaaaggtggatctcatggttgtgttaatatccgtcctagtgaaataaaaaaggtctgggatgcagttgaaatgcatgagccagtaattgtttatgataaataaattaagttaaaagctagttctatcaatatagttatagaactagcttttttaataaacattttttgttattttagcataacactattgcataatttgttattttattttatattcatagagagggcatgagggattttaaagaaagagtggattttttcaatgaatttacgtcacctagaattttttgtcgaacttgcacatactgaacatatggcaaaggctgctgaaaatttaggaataacacaaccatctttgtcatatgcaattagtagcattgaaaaagaattaggtgttccattatttgaaaaagatggacgtaatataaagttaagtaaatatggaaaaatatatcttagatatgttaaagcgggtttagctgatttcagtaaaggaaacacttatatcagtgaattagtagatactaatagcggaactgttagatttggcttttcatctgcagctagagaaatcgcacctgtattagtaaatgcttttaaacatgaaaatcctgaacaacatcttaacttctactttgagcaagatgttacttcagttatcatccaaaaactattgagtgaaaaagttgatttagccattgtagctaatcctgatgacttagaatctgtaaatctaactcatttatttgatcaaaagctatatttagccgtttctatcaatagtcctttagctaagcaagataaaattagcgtaaatgatttagcttcttatccattaattacctatcctcacattaactgcttaagacaaaatattgatactttctttgaaagagctggaattgaacctaacatttcaatggtcttagcagatacagcacttattatgaattttgtaaattcagactttggggtagcaattgttcctaagagtaatttaattaaccaaaaggaaataaaattcctggaaattgacagtaaagctgctatcaatccagtttatgtagcaactaaaaaaatcatttcttatctcctgcaacccaacgactacttacttatattaaaaactattataaaaaataaaaataaaaccgttaaagcattgctttaacggttttttgatacatatcaatgtaattctaagtacttctcagcatttcttaaatcagaaatagataattgacctggagcggatgtctgaccaacagctccaaatgataaacttgatccaaatacttgtccagctatccgactaacttttcctaaatctcccattgccattgtaatgatagggttagaaatattttcatttacaactgtagtagccatcaataaagtcaaaacatccatgcttgaatgtggcatacaagcaaatttagggatatccgcacctaattcggccatctttttcaatctaaattcaattatatctttgcttggcactttatcaaaatcatgattactcataacaacaatcacattatattgatgcgccttttcaactaatcctttaattgtatcttcattgtgaaaaagttcaatatcaatagcatcacctagtctatttacaataatttgatcaagtaaagataaatacctttcttcaggtaatgataacactcctccttcatttttggttctgaaagttattaaaataggtatttcttccataaccttacgaagttcttgggctaccttttttaattcatcaaaattatttatacctgcttcaaaataatcaatccgccactccatcaaatctggcttagcctgtataatttctttagctgcagatataatttcttctcttgtttttccgacattaggtacagctattttaggtaatccttcacctaaaactagattcctaattttcacagtcgccataatacttcctactttcctaatttaccaaacatttttttgtatcgcatagcaattaaactcgtatcaataaatccaattaatgcaataattacatcaaaaagcattacatttcgcatgtttccaatccaattaattgctaaaggtatcgtaaacgatgcgattgagcctgctgtataaaagaagcctgtaactgttcctttacctgcagggaagaattcagccatgactgttaatgccaattgcattacaccacccgctgcaaaaaatccgactaatagtgataaaataatcatcaaatttgcattagttgggtaaatccacattaaccccaatgaaataaatgcacctaaagtataaacaggaacaaattgaatttcactgaacttcttacccaaagcagctgtagttaatacacaaataattgaacctaaagaataccaactaactaatgaatgagctgctacttgcggaagattacctattttttgaccatattgtgtaagcatttgacttaccaaataaaaggttgcttgtgaaatatatccataaataataaataaagtaccatctaaccataaattagttttcacattattattggttatcttttcttcaacagttttactagttgaattcgaatccggaaaagccccaccaaacatgaaataaagaaaagtaataaccaaaatagtagctggaattaaaaatgaccatccataccacatatgtgtagctgctaaaaagctgacaataaatggcaagaaaaattgccctgcactaatgaatgcctttaatacaacattagaagttcctttagaatttggataaatttccatcaaacctggataagtacctgtatcaaggaatgaattagccatacctgctaaaattcctagaatatacgcaataactgtattcggtgatatcaaaatgccaacaaaaaaaataaaataagtaacaattcctaattgaacaaatggctttcttccaaatttatcagataacacccctgaaactaaaagatttataatccgcccaattcctagtgaagaaactactgcaagagcaccggtttccgtagttccccattggtgagccaaattagctgcattttgagacaagataataacgcccatcccatgaacaaaataattgaaataaagcgctagagccgtaggtgtatatttgttcttcataactatccccaaatctacttagttaaaaactaataacttttacttattatctttagcatcattttcaaaaataacttcacgaatataatcagttggcatatctttaccagtccaaagtttgaatgcggcaacaccctgttcaatcatcatgccgataccatttaagacatgttttacaccagctttttgagcaactttcattagcttagtagttcttggagcataaactgtgtcaaagacagtcatatcttcgtggaaccaactaggatcttcaactaaagtcatatcttcaagaggcttcatcccaacacctgttgcatcacaatagatgtcgcattcactaatggcgcgcttgaagtcatctttgtcttccaagtggtgcaaactagccttacagttagtcttttcattgattgtcttaacattcttttcagcttgagcccatttatcatcgttaaggttaaaaatttcaatttcactaacaccatcaagagcagcttgaacagcaattggagtggcggcaccgccagcaccagctaaacacatcttcttgccgcgaatatcaataccttcatcttccaagctcttcataaagccaattccgtcagtagtgtaaccagttaaaacaccattatcgttaacaatagtgtttacagcatcacacatttctgaagcaggagataatttatccaagtactttataacttcttttttattaggcatagaaacatttgaaccacgcatatccaaagttctaatagcttcaactgccttaggtaacttcttgttatcaatttcaaagcaaaggtaggtaaaatttaaacctaattttgcaaaagcattattgtgcattgttggagacattgagtggcgaattgggtaagccatcaaaccaattaagtaggtatgaccatcaagccaaccattaataggaccatttacaccagttattttatttgtcataattaaaatctccttaataaaaatctttgttaatatgttctcaattcaccttttatggtatcgttttcaaagtaagcaataaataaaactagttcgatttatcaataaagacagtttattatttatcctgtaaatttgaggagaaattttatgaatctaagacacttggaattctttgtagaattagctcatactgaacacatggcacgagctgcagaatctttaggtatctcccaaccttctctttcatacgcaattaacagtattgaagatgaattaggagtgccattatttgaaaaagaaggtcgtaatattaagttaaccaattacggtcgcatctatttaaagcacgtagaagcgagcctagatgccttaaaaaaaggtaatgaatacgttgcagaattacatgacattaatcaaggacatattcatttaggatttacttatactatgggccaagacctagtacctgagttagtttcaacctttaaaaatgatccaactgctaagaaaatcactttttcgtatagccaagatattacagataaattaattgaagaattactagaagaaaaactcgatttagtatttgcttctaaagctacaacccctgctctagtagcgcaagttaatcaatttcatctagtaaatcaagaattattagctgctgttccttttaaccatcctctagctaaaaaagatgaagttactctttccgaattagctaaatatcctatggtcctttatcagcgtaatagtggcttaggaattttcctcaaaaaaatattcgatcaagcaaacataaaacccaaagtagctgtcgaagttcaggaagaccactcagtcttaggatttgttcgttataactttggggttgcaattgtaccacatatgtcacaattaagtagtgggatagtgaaattattgcctattaaagataaagcagtagtgcacccaatttatgcaattactaaagcaaatcattttttaccaccagttgtgcaacgttttcaaagttacgctgaaaaatattgtcgaaatagttttaacgagaaaaatactacgatttaaaaaataagctattcttatctcctaaaggataaaaatagcttattttttatcgattattacaattgtcgctggcattagttccagctaaaaagcctgaagcataactccatgaattcatcatacttggcatagagtcatgaccattggcaccaccaattacttcaccagctgcataataattagccactggcttcatatcattatttaataattgcatttggctattagtttcatacccacctaaagttgtacagaagcgaagtttttgttcaataacgtagtaagtatcacctgaatattcatgcataaattttgcttcacgtccgaactcaggatctttgccatttttggcataattttgataattagataaagtatgctgtaaattttcaaaattaataccagctttattagctacggtttcaagagtgccttttactaaaattgggctttgtttgccatcaagtgcaaaataatgactaatttcatcagcagtaaaaccatatttaagcattaattcataaaatctgttccaaattctttgatccataagaacaaaagctatctgatctttttgagcagcaattgcatctctaaaatgagtgtatggatctgattcatttacaattctattaccagcccgattaataaaaattgcccccatatcacttgcttcttttgttgaataagttgtaagtttagcaattccaggttcaacttctaacccatgtggataaactttataccaatctaaattacgactagccaaatttaatcccttgttaaagaagaaataatctccagttgaagtcattggaccataataaggaatcgaagttcgcttttctttaaagtctttggcaccccaaccaccggcagctaaaataagtgatttgaacttaacgtttgtagtttggtgctttccttcagcaactagactaataggtacaccattttcagaattgattttttcaacacgagcatcaagtaaaatcttgccacccttttcttcaaaggcagctgctatctttttaattaattcatatgagctttcacttggcatttccacttgccgattaactgaatgctcaattgtttgtgtttctgctttttgataagtcaaacccgcaaactctttaataaaatcaacagctttaccaatattttcaaccaaaacttttgataattcaggataatttgtacctcggcattcacgagtaatatcagcaaaaagccgtttactactatcttcttgtgcctcagtaccaaataattgctgagccaagttagaacctgtagctactacatttgaaccatttaatattgtagctccacctaaataaccattcttttcaagaactactacattttttcccattgaaagagctcggcaagctgcaatcaatcctgcggcacctgagccaatgacggcaacatctacatctaggtttacttcccgatgtgttttatcgctctctttagctactggtgtaactcctgcctgattcaaagccttttttccagaatcaagtaaagcacttgtcataattgtagcgcccgatacagcgtctacatcaaatgattgctcctctataatggaattttttaatttatcaaaaacctgattaaatattgctggtgtttcactagatttggtaacctttatatcttttatttcgttattatcaatattaatatcaaacttaatcttaccattacgaccattagcttcagcttgcaaagtttgtttagtcatattttacctctcctatcactaacagtaatcggtttcattttaaaatgattttctatttaaaaaaacaaacaatagcagaattattaatagattcagactattgatataaagcaaaaacaatctcataacgccatttatattttcgatataaaaatacttaacatattttttaagaaaaaagatgttaaaactacaagtaatgtccaatttgtgctaaaatcgttatgatttttaaagcctttacattttataaaaatcaaaaactgagaggaaaatattaatgacaaatgcaaaaactgtcggcagtattgaagctggtggtaccaaattcatccttgccgttcaagatattgagtctggtaaagtaatcgcaactgaccgaattccaactacaagtagagatgaaacttttacagcttgtgtggatttttttaagaagaatccagtagatgcccttggtatcgcaacctttggtccagttgacattaaccctgattcacgtacttatggttatattttagatacacctaagccaggttggtcaggtgctaacttcaaaggattcttcgaaaaagaattagacattccagtttatattacaactgatgtaaatggttcttgctacggtgaatacattgctcgcggtgctgataacactaagacttacctttacgtgactattggtactggtgttggtggcggtattattcaagaaggtaaatttattggccgcaactaccacccagaaatgggtcatatgatggtagtaaaagctgaaggcgatgactacgaaggtggctgtcctttccatggtgcttgtgttgaaggtatggctgcaggtcctagtcttaaagctagaactggaattcctggagaagatttaccaagagatcataaagtattcagctttttacaatattacgtagcacaaatgctttacaatgcatacatgaccactagacctgatgttatgattgtaggtggctctgttttaaacgaagatgatttagttcaagtacgtaagtactttgatgatttaaataataattatgttgcaactcctgcacttgatgaattaattgttcgtccagcagttgccaataatggttcagcaactttaggtgattttgaattagctaaaaagttattgaaataagcatattaaaaagacctcggaaatccgaggtctttttattgcttaattaggcttttttcataagtttaatttgtgtttttacaaaaaatgagacaagtaaagatatgacatcaataataataaaaataagtagagtcttggaatagtcactgccatgactggtataggtgataattgtaggaccaaccattccagcaactgcccaagcagttaaagtgtagccgtgtaaggcaccaagttcacgagtgccaaacacgtcacctaaataagcaggaattacggagaagcctgctccgtaacatgatagaagaagacaaagtgctattgaaaatagtagttcttgccgcaaataaagaattgtgcctagacaaagaatatcaacaacaaaaatcaaggtatatgttaggggacgacctatatagtctgataaacttgcccaaatcaatcgaccaaaaccattgaataaaccaataattccaaccaatgcggcagctttagcggcatccatattgaccatctcttgtgccatcggagaagccattgagacgaggccaatacctgtagtaatgtttataaagaacataaaccacaaacaataaaaggctggtgtttttaaagcgtcattagctttcatctgaacgccggtgctacttttaggtaaattagtttgaactggaacttctccaggttgaggacgcttaattaattgagctgctaaaagcattaccactaagtaaacagcacctaaaatataaaaagtcttttcaaggccgacgcttttaagactcaagaggtgattagcaacagtactggttaacaaagcagcaaagccaaaacccataattgcaagtccagtagcaagcccccttttatctggaaaccacttaataattgtagaaacaggagttacataccctgctcccaaaccaactccaccaattacaccatagcacacataaagtagccaaagttgatgagctccaattgcaacaccggtaagcattacgcctaacccgaacaagatagcagaaactgtaccagttacagtaggtccatacttttcaactaatcgtcccataaaagcagcagacatccccaggaagaaaatagctaaactaaaagcgaatgttacggccttaatggaccaaccagtttcagctgcgattggctttgtaaaaacgctccaagcataaacagaaccaatcattaaatgtaaaacaacgccagcaagggcgacaacataacggtttcttttcaatttttacctccaaagtatcaaagctaagttaatgcttacaggtatgaatatactacttttcaaaaatgggtcaattaatattgtagtatgcaaataacaatatgtgctatacaaattggcggtgcattcaatatattggggctttaaaaatttttactacaaaaaaacagaagcaaatatcgatttgcttctgtttcttaatgtacggatactttatttatattcaatctcttgaacaacatcaccagctaaaattggtctaggatcaacatctgatacagaatttagtaaatccatattagtatagaccacaataattgtatcagataagccagcttgttttattttatccaaatctatttgggctaatttatcgcctgccttaatttcttgattcatttttacaaatacatcaaaaggcgctccttttaattcaacagtatcaattcccatatgaatcaatacttctaagcctttatctgttgtaattcctagcgcgtgctttgtagggaacagggttgtaatcttgcccgataatggagcaacaaccgcaccatcaatcggttcgatagcaaagccatcacctaacattttggttgaaaaaacatcatcattaacatcagtaatcggaattaaatcgcctttaactggtgaaataacttttaattttgagctttttttaaataaaccaaacattgcttaacctctactttttcaattcaattactattaataaaacaaagcaaagaaataataatgctgtaccaaaatttataaccaactttacttttgaattgacttgtccctcatttttcagttctttacttaaatgaattcctaaaatgcccataattacacacataaaattaccaactaaagcttgtgtaataacttgtgtaatcataaatcgtttataggtctttttcttaccaaaattagataaattcaaaagacaaaagtaaccaattatcaagtcacataaagctataatcacaccaactgctaaaccagcctgacttcttataagattagcaaaactggttcttgctgttactaaatttaaacttaccaaaacagcacaagcaagtggaaccaaaattaatatatatgaataccatttcagcaacttctttggtgttaattttaaattttgaacgattcgatctaaaaaactagaaaagtttaagtgtgaaatcatagctatcccttcttttgttgccaatcaaaatatccatttataagcaaatcaatcaaaatataagccggagagaaacaggaccggggattaccccccccattattttggtaactgaagtcaattgtttggaaaaagaaactataatcagaaattgtagctaaatcattactacccattttggtcaaagatactaattttagcttatcatcaattagtctaatcttctttagttcattaacaatagctgaattattaccagaatatgaaatcgtccatagcatatcacccttgttaaagaattggccacgcatctttagctcatctaaagctgatggtagtaacacagtctgtttaccaagtaaaaacaattctttagagatataactagctaataattcctgttgccaacctgtagagtacaagtaaatgtttttagctgtttggatatcaatataaaaattagtcaggtttcgagcttcaaactgtttaatcgtgttagtagttaaatcagccatttctttaatgaaattattattaggttgatgatttactgaagaggcagctaaaagttcaaatctcaattcactgtaaccagacaatcccaatttcttacatagtctaaaaatagcagattccgaaacatagagctttttagataaatcttttaaactaagctgagaattttctttagctgaacttaataacccttgaataatctctttttcagattcactcaatacaccctgtttttcataaatacgcgtttgtaaattcatatttccatctcccattatgctagtttaaatatagcacaatggactaatacaaaggactacagacgttaatatttttctacttaaatattatatttttgtatccaacataaaatttaatgcttctacattatttctttcatttttgcaataatggcatctgtttctaatcctactgcaatatctacttctttatcttttatttctaggttgtatgcaccaacttgcttaaatgcagcttcatcagctactagacttggatctactacggtcactcttaatctagttgcacatgacaatagattatcaatgttactttgaccacctaataaatcaataaaaccagtagctttttcaagagttggatctacttcagttgaagcaacattattgtgtccttgttcttgcatcattgtttgcattctctcaagaacttgagcaacatccaaaccgacaattacttgtaatgctttaccatggtggacaacgctaactgccttattttgcttaaatgcagcatcagatgcaactttattaggatttactacagttactctcaatctagttgcacatgaagttaaatcttcaatattgcttggtccacctaataattcaagataagcagatgcacgagcaatatatgggtcattagcattagcactacctgctttttcagcagctttcttagctttgtattcagcctttgaaagaagtttaacatcttcatcatctgcttcacgacctggagtaatgtaattaaacttcaaaatcatgtatttaaatacgaagaatacaattacggcaaaaataattccaatagcaaattgaataatatatgtttgccagtggtgtggccaaagtggaatccagttttgagcggcaataccaattgcaccatcagtcatgttacctacaacaccaaatgcacacatggtagtgttcatagttgctgaaagcaaagaataaatcacccataatacaggtgcagcaaacaagtaagtaaagtctacaggttcagtaatcccagcaaagactgaagttaaagctgctggaataagtaatgctgaagtttgctttttcttattcttctttgcagttgaatagaatgcgtaacaaatggctggaactaagaatactttttcattcccataaagttggaatcctaattgaggagctaaaacactaagtggcttgctgctttgagcaaattctgctaagtgctttaaccaatatggttgtaacccaccttcaacaacagcaggaccgaattggaatggaatatatactaagtggtgtaaccctgttggaataaggatacggtttaagaaagtgtaaatccaaacaccaactaaaccactgtgtacaatgaaagtttgcatacttgtaattcctaattgaatcttaggccatactaaacaagtcaagaatgcaaatggaatcattacaaagaaacctagcattacaacataagttgaaccttggaaagtagctaaccaatctggcaatttcttgtcaaagaaatgattatgcaaataaattacaattccagctactaataatgcccctaccatactggtattaagagtttttattccagcaatcattgtaagaccaccgttagttgagttagcaactaggtctttagcataattatttacgccaaaaaatgggccccaatattgtaaaaagcctgctacaaaataattaaatgttaagtaaataactaatgattccatagcagctctacctttagcagcatgagctagaccaattggtaaacctacaacaaagagcaagtttacttgattaaatacagtccatccaccattagctatcacattccaaataccgttccagaaagtaccatcttttgcaagagagccaaaaatcaatggattggtaaataaactacataacgctacgacaatacccgcaaatgagaataaaaggactggaacgaacattgcggctccaaacctttggagtttctgcatcataattttcacctcgtaagcaaaaaggtgctaactattagcaccttttatatctttacaacttttatttagattttgattactttaattctggccaataaggtgcgttaactggaatcatatcgtcaagaatcttctttgcaacaagtgcatctggaacagtcttattaagagcaaatgcttgccacatcttttcgtatgagtgttgttcatatgcatcaacaactaattgctcacaagttacttgttccatcattaaacctctttggaatctgccagcttcaccacaggcaattggctgaacaccatctgcaccaaagagacatggaacttcaacgatacaatcatctggcatattagaaattgcaccattgtttggaatatttgctaagaatttttcatgggtgttgtaggcaattgcatgacagatatcaacaatatattctgagtgaatagcattcttatcccaaatattattcttagctgtgccagcttcaacaattctcttacattcaccaaagacaatcttttgacggtgttcaagaatttcatcagtccgtgtatgatgtggatcagcatgagccacttcatattgtgggtagtagtaatattgcatataagtatttggcaatgtgtctggttccaaagcatagcaatccttggctttcttgaaggttgctacccagctagcttcggtttctttgtcaaagtctccgcctacataatatccattttcacgaacatatttctttagcttaggcattaagtcttcgccggtcttatagtttctaacttctttccaccagccaaagtgattcaaaccataatagataaagtcaagatcatggtaatctttaaggccacaaatttgagccattctagtcatgatatcaattggcatatcacaaatattaattacctttgactttggacggaagcgacgacaagcttcagaaacaattgcaatagtgtttgagtagttaatcatccatgcatttggtgaatacttttccatgtaatcaataatttgaataattgctggaattgaacgtaaaccatatgccattcctccggggccggttgtttcttgaccatttacaccatatttaagaggaatcttttcatcatgactacgcatttcgtatttaccaacacgaattgaaccaaagacgaagtcaacatcagtaaaggcttcttcaggatcagtagtatatgaaaactttatttgtggggcacgttctttaataataatggcacatgcatcaccaatcttcttttgtcgttcagcatcaatatcatagaacttaatctggcgaagtgggaatttatcttgttgattaattaatcttaaaataaatcctggggtaaatgtactaccaccaccagcaattacaactgaaaactttcgatcatctttaaccataaatctgtctccttagaaatgataaacattcattaagtgaggtaccttacatgtttatttataccaattgtttttactctttggaagccctttcattactatagaaacagtatttcagtatttaaaaataaattgtcaatttttgaaatatatttcaaaaaattcttcatacaaaaagcgttaatattccttagtgtcgtactaagtttatcaacgcttctaaattcactttaaaaaaatcaatctaaatcgtcacataaaaattttattactcgattgtatacctcttgtctattttgatgaaggccatgatcactctctgctattaaatgaatttcagattgtggccaaattgcatgatatcgaattgaagcataattatttaccactttatctttttctccatgcaaaatcaatacaggtttgcgataactttgggccacatcataaatgttaagaaattgagcagttctaaaataccaatcatttaatttgaattttccaaaatctaatttagctggaatattattaggatcataatttattcccatgcaagttcctattttagcatcatcaactaatgtagtagcaggagacataagaactaatttttgaatcttatctcgataaaaccccgccatcattgaactaagtactccaccttgagaatgtccaactaaatatagtttacgaagtcctttcaaattcaatacataattcaagactgcatgatagtcttctagttcattgtaaatagacatattatctaataggccttcactttctccatgcccattaaaatcgaatcttaaagtagctatacctcttttttgcaatttatcagcaatctctggcaataaattatttaccctaggattcatttctccaacaaatccatatgccaaaatagctaaatcaaatgtagaatttttgggcaaagaaactttagcagctaaatttaaaccatctctagaaatctttatatctttttcattcattatcattactcctagttactttaaagctaacttttcatttatagcttgtttaatttcattttgctttactattaagcccaatattgcaccaaatatgcaaagtaaaatattaaaaatcaatattaaacgcggtgctgcagttccaaaactagttgttataattgccgcaacttgaattactccccaatttgaaatcctatttgcaataaacaatgtagaagttgctgtggctttagcttgaggatataatcctgccataagagagattgctaattgcaataaccctcctgccgcaaaaaagcctataaatccggaaacgataaataatacaattgggctatttatcaagtaagctaaaaccaaggcaagtgctgaaattactggatatatagttaaaattgttgattctttaatacctttatttttaataataaaactggtaagcaatactgatattaatgagcaaaccgcataaacagactgaagtagagcaggattagttaaaccgtatgcttttcctaattcttgattagtttgtgtccataacataaaaacagcagtagacgtaaaaccaattaggcataaagcaacagcttctaaagaaatttttacgtttccattcctaactgcccctttagttaccggcttttcttgatttgaaattcgactatctggaaacggaactaaaaagcaaataattcctataattaaatatgcgattcctataaaattaaatacataagtaaatgggactttttctgcagacaagaaaataattataaatggtaaaataaattgaccaaaactaacaaaaaatttagtaagtaaagttaccagagatctggaatctggatatgcttccatcattgctggtgttaatgctgaattgctaaatgacattgcaataccagtaataataccaataatatacgcaaaaacagcattaggagcatatgcagttccaaaagcaaaaataacccatccaaaagaacctattattgctgaagttcttcgtccaaatttatcagaaataatccctgtgaataaactagcaattaaacttcctattcccacggctgaagaaacagttaacacaacagaaatattattaccagctccccatgcatgagctaattctgtcttatattgagctgaaatcgacatattaattcctaataaaagaaacgataaataaattgctattgtagtagataaataatttttatttggcttcataacttttctccaatataaaatgtgaaatatttaacatttattacaatagctaggatatccttttagtaagcgctttaaaataagaaatgctgtcaattttaatagatttattctattattcacatgggaaaaatctatttatagttattagctaataatatatttgttatagtcaattcattcaataaaaaaactagaaatcatctgctataaaagctagaatttccagtttttttaatatctaactattaatctttattcttcctcgccatttaatttcaatagcaaagcatacaaagctccataaatattggcttcattcataaacttagcccttacaatctttggccgtgttaacattttcgcaataaatggaacttcattagtaatcaagtcatattgcttattgatagtttctacaaccttgggttgagcactaatacctccaccaattacaaatttatctaaatcaactaccgattgaatattaaaaataattgtggcaacttctttacattctcgctctaaaattttttgtgcttcagcattacctttattaatagcatcaaaagctgcgtacccatcttttaagtcggaatttccaattaacttattaacactttcaatcatttttacagcagaaccgtaagtacaaccaaagcggtcaaaacctgacttatctccttcagtctgcataaagctaagttcacctgcttgaaaatgacttcctctccaaattttcccatctaagatgattccgccaccaataccagttcctaaaacaattgcagcaccattattaattccctttaactcgccaagccaaagctcagccaatgccgcagctttaccatcgttttctacaccaacggggacaagatatttatcaccaacaagacgttgaaaatttacaccatctaaatagggtagcgagccaccaaaataaacagtattagtcttagtatcaaccttacccggtacactaaaagcaattccttcaaattgaccttgataatgatctgcaatcttataaatttctttcaagaaagctgctaaatcatctgctggtgtaggaactttatcatgttcaataatcttaccagcattatttaagagagcatattttaaattagtaccacctatatcaaaagctaaatattgtgtcattttattggctcttttctatttaaatttaaagttgttgctttgctttaatattaaccctatgtactcgcaaataatgccctaatccataaactgttaaaagtataaaagcagctgcacaaataaacattgcaaatcttggagttgaattacctaacaaaccagataaggaattaagaatatatggtgaaatagaacaagcaatattaatcaaaactaaagcaatcgttgtagctaagttaactgagccatgtggtgctgcccaagaaatccaattatacaagtatgggatagctaaagctgccccgaaaccaagaacgatatttccagcaaaaatcataactaagttggttgcaaaaccaaataataaaaatccaagtgcagttatcaaaaatccaagtgggaaaatcttatcatgtagctttttaaagaacatcccaaagcttgctccaagaggtattccacataacccggtaatcccggttaatgcagcatattgactcatactacctaatttttcagaagttaccaagagaggcaacttgtaagaaattggcatataaaaaataaatagaatgaaaaagacggtccaaatcacaactaattttgagttgattttttctctattctttggtgcagcttttttagttatcgtcttattagccttatcattaggaataaatagtgcaaataaaatgaagactggaataattaacaaataaataccaaatgccatatgccagttaatggtaactaaccagcttaaaacaaatgaagcaagagctgtccctaaggctcccattacattttgaaaacctaacattgaagccgtttcttcttcatcatcattatagaattggggaatcaatgacactgccaatgaattaaataatccaattcccactcctaataaaagtctagaaattgcaatcatcataaagttacttgcatacattggaaaagtgccactaattaatgccaatactaatccagatagaactgttttcttctgccctaaaaatttaatcaaaataggactcaagatcaagccaaaaataatcccaatattaggtaaagtaactaacccttcaacactagccttacttactccgctaaatgctggataaagtagtggcagtgctgacgatactgctggtgctatcatcaacaacgttgaaatagacaataacgctattttgaaaattagactatttttattatatttcattgtacagccctcctataaatttcattaattagcataccgccatgagtaagcgcatacaatgttgctggttatctaaaatatggcgtctattgactctttttattttggctacaaatcgccagttttttgtcattaagtagtcactctttttattttataagctgtacactggaactgaattatatgtaaggaggaattaattatggcagatttaccaacttctacagaagaattacgtgctctttttaaaaaaggagacgatgctcgtgatgccggattacctactaacattccagaagtcgagcgaattgataatttaagttatggtcctgacaaaaaatggaatttattagatatttatttacctaaaaatagaacgggaaaagttcctactatcattagtattcatggtggtggctgggtatatggaactaaagaaacttatcaattctatggtatgtcacttgcgaaaatgggctttggctttgtaaacttcaattatcatttaggacctgatgttgtctttcctggaatcttagatgatgttcaaatgttaatggaatgggttgaacacaatggtgagaaatatcacttagatctaaagaatatcttcttactgggagatagtgctggtggccaaatgactgaacaatatttagctattgccactaatgatgattttcgcaaattatttggttacaaacctttaaactttaaatttaatgcagctgctttaaattgtggtgcctactttatgcttgataaaggacaaactcaaggtgctgtagctgcctactttgcaccagatgcaattaaagataaaaaggaacttttaaatactgaacaatatttaactaaaaaattaccaccactatttatcatgacagctaatgaagacttcttacatgataatgcggtccgtttggatggatttttacgcgctaaagggattgaacatgaattgcatatttatggcactcctgataaccctaagcaacatgtcttccactgcaatgttcgtgatgaagtcggacaacaatgtaacaaagatgaaaccgattttttcaagcgatatattgtaaaataggtttatctcagttctaatggaggactgcaaaacctatgtacgaacatgaatttgttaagccggttgatcaactagcaatttggtaccatatttttgaaaataatcaatcttggaatgcttatattcccgttcattggcatcgtggaattgaattaagctatctagaacgcggattaattgatgattttcgaattggtgatgaacactttgcttcaaagtcaggtaggattttagtagttaatactcaggaaattcattcaattaaaactcgtgttaagcaaaaagatttagccctttccatcatttacccgtactcatacattgaaggactatttcctcagattaacaattatcgaattgaaattaatcatcctgataaatttaccaagtctcaaaaagttgcttatctggatcttaaaagcaaattaattaagtttatagctactgttcaggaaaattcaaaagatcgaaacatccaattatcaattatttcactagaaattttggatattttactgaataattttattcaaaaaagaaaacagctccctgctaaaaaagaagtaattactcaaagacttcaagaaattgtcgaatatataactactaacctaaagcaggacttatctttagaaataattgccaacgaatgtcatatttcacgagaatatcttgcaagatttttcaaaaagaatatggcaatgactgttgcagaatatattcggtatcgtagagctatttcagctcgaaaagatttactttcaagtaatgcaacattaaccaaaattgccattgataatggctttagcggaattcgttctatgaatcgagccttgcatgaattttaccacgaagatgcaaaagagattcgtaaaagagaaaaaaatagataataaaaatggcataagttgttgtacaattaaatatcaaatcagaagcaaaaaagacagttgaggttaccagctgtctttttatttgcaaaattaattagcactatttattaggctctaatcgttatataagtgtaggcaacaaaaaaggcggttctaacgaaccacccgcaaaacgtcgtcgacgaattgatttccctttcaattcttcttacacgttaatttattatttttgttattgtggtacctccaaagtacctgaaaaagctcttcaaaaagtttttagaagataatcaagactaatttgttgagcaagagaagagtaatcatttttgattgctcttttttattttttctccgaggctcttggagtggaaatgtaaattcctaaaatattttagcaaaagaaagggtaaccgaataggttgccgtttttattcatttattaaattaaagtaaaaaaagaagcaaattactaattgcaatctgtttcttcatacggatattttatttttctagcccaaatcttcaccgtttgaggcaataactttcttataccaatagaatgaatccttcttgtaacgcttcaaactcccgttaccttcgtcatccctatcaacataaataaagccataacgtttactcatttgacctgtgccggcacttacaaggtcaatgcagccccaagtcgtatagccaattaagtctacaccattattaattgctgctttcattgctttgatatgttgcttcaaatagtcaattcgataatcatcgtgaacttcattatcttcagtcaatttatcaactgcacccaaaccattttcaacaaccatttgtggtaaatgataacgatcgttcattacttcaaggtaatattctaagcccacaggatcagttgcccagccccattctgaatacttcaaatatgggttcttagctcctgcagcaaaattacctccaactttatccttagattcatgcgtggtaattacattagacatgtagtaagagaaagtgtacatatcaacttttccagctttaagatctgctaaatcttggtctgtaatatccaaatgaacattgtgttcattccacaagcgcttagaatagcttggatattcacccaaggcttgaacatccccacagtagaagatattttgttcccaagcataacggttagctaaaatatccttaggatccggggttaatggataatttacaataccacaaatcatgtttccgacaacataattagaatcaatttcgtgagcagctttaactgcgcgtgcactcgctacaaattgataatgcaacttttgataagcgtgttgatatacagcatcatcatttgtcttttgaccaaacaaattaagcattaacaaactacagttaatttcattaaatgttagccagtacttaactaatcccttgtattcattgaacaataccttagcatacttaacatattcatcaatcatagcccgatcttgccagtcattatatttttcacttaaatataatggatcttcatagtgtgaaatagtaactaaaggttcaatattatatttctttaattcttcaaataccttgcgataaaaatcaagacctgcttgattaggttctttttcgtctcccttagggaagattcttgtccaagcaatagacattctgaaggtcttaaatcccatttcagcaaataacttaatatcttctttgtaatggtgataaaagtcaattgctacatggttaggataatattcatctggtagaatcgcaccttttgcaccttttggtagccctgcaccaggcattgctggtgtttctcctgctttaccattaagcatataagttagcattctaggtttttctaaactaccagcggttgtaatgtcagttactgataacccttttccgccttcatcatagccaccttcaagttggttagcagccgttgcgccgccccacaaaaaatcttttggaaaacttgtctttgtattcatatttttcctcctaatcaaggtctaatacattatcaccaacgtgaactaatccttgtttagctaagctaactttatgatagttctttgtattagtaatcacaattggtgttgtcacatcatagccagcctttttaattgcttcaatatcaaacttaactaatggatcaccagctttaacaacttgatctttttttactaaagtttcaaagcctttaccattcaagttaacagtatccataccaatatgcatcaatacttctgcaccatcatctgtatgcattcctattgcgtgtccagttggaaaaactaatactacatgaccattagcaggagcacgtaagacaccttcacttggtctaatagctgcaccatctcccatagccttagttgaaaagacttcatccttaacttcagataatggaattaattcaccgtttaatgggctaactaaagtagttggtttattgtaatcaacacttggctttacaacagccgcattctttttaatttctttagcttcatttgcggcaacttgaacatcattagcaatatgttcttgatcttgtgcatcgacagcatctttaccaaagagcatttgtaaaacaaatcctaaaataaaggcaacaattgtagcggcaattaagaagtaaaagctcttatcaatcccagtcttagggttgatggctgcagggtataagaagattcccataccacccatcatgtaaagttttacattacctaaagcaataataatagttgctaaagcagaagcaatacatgaaataatgaaaggcttctttcttggaagagtaacaccataaattgcaggttcagtaacaccaaaaatacctgaaagaaaggcaggaaatgcaagacctttagtcttttcgtttttagtttgcaaaagaatggctaatactaccccaatttgagcaaatgaagcagcagaagataatactaacagcttatcaaaaccatatgctgcaaggtttgcaaagaagactgcgacaaatccccagtgtacaccaaagataacaaatacttgccagaaagcccccatcaaaattgcagcaagaataggacttaagttataagctccattagtaacagcagcaagtaagtcaccaagccaagtagcaacaggtccaataactataaaagttataggaactactattagcaaggtaaagaaaggtactaaaaatgttctaacaactgctggaacccaactcttgacccatttttgaacatatcctgcaaaccatacagctaagataattggaataacagttgatgaataattcatcataataactggaataccaaagaaagtagtatgaacatcagattgtaagaaagttcctttaaagattgtcattaaagttgtcttacttgaactaattgcaacaattgctggataaagcattgccgcagcaattcccatagccgtaaaaagttcaactttaaactttttagcagcattaacagcaatcataattggtaagaaataaaaaattgaatccccaattgcataaagaatttggtaagcacctgaagttttagacaaaattccaagagatgcacaagcagcaacaagtcctttaatcattccggcactagctaaagcgcctaaaaatggagtaaagatacctgaaacgatatcaataaacttatcagcaattgacatgttgctcttatcaacgtaatcatcagcaacttgaccaccgtcgctaaagccaccgactttgattaaagtatcgtaaacgtcagcaacttcattaccaataactacttgatactgtcctgctgatttaacaacagttacaataccatcggtatttttaagctcatcatcatgggctttcttttcatcttttaacttaaaacgtaaacgtgttgtacagtgaactacactgactacattatctttaccgccaactccagcgataatctttttgcttaggtcttcgtaggccatcatttacacctcttaacaatataaaaacccgagacatcatgccaaaatactccagaagaatctggttagtatagacataatctctcgggttaatgcttagcttaactaataacacaccttagtgattacttgttaaatattaactttatggttttatattactatcatttgtaagcgctgtcaatacaaaaatataaattatcgattgcttactctccacacgtgtaaaataagataaacttcatcatcttcactcaactgataaccagtcttttctttaataaaataagcaatctttgttactactttgctagtttcaggatatttttgtttcatcaattgaccaaaaataggatctaggccatcatttttgcgttcttgctttttgataatctgaataagtaaagcacgcaaatgagttacaaatctactgtaattaaacgaggtacgatctaacttttttcctgtttctaaactaacgatacgcaatatcccatctaataacttactaagttccatcgtttcttgaactgtttctttatcaaagccaacattaaccaaatgataagtcaaaaaaacgacttcgctatctggtagagttacttttgcttctttttcaaccattgttactaactctttagcaactgctacttctttaggatagagcttaattacttcccattgcatcatttgattatctaaaaccaaattttccttacttctcgttaacataaagtcaacatggtcggccaatgaagtataagcataattatcaaacttaattccaagttctctttgagaaagctcaaccattttattagttaagctgagagctaatgaacttaaactagtaactgtttttaaagtggtatcttgatcggtatttttaaaacgacgttctattttttcttcttcaattacatcgccggcttttttaccaaaaccaatgccttttccaataacaatccactctactccagcttcatccttaaccaaagcagcactattgttataactcttttcaaaaatcattatttttctaccttatatcttgagaccccatctaagtaagtttctactaaggtcatatcattattcaaaatcaaaaagtcagctgctcgatcaggtgcaataacgccacatctatctaaaattttactactcttagctggaacgtaactagccatcattactgcatcttctcgactaacaatatcccaatcgactaagtttttaacagcatcttttaagagtaaaatacttccagctaaattattgccattaaccaaacgagccataccatcttttacataaactggtaattcacctagcatataattgccatctggcatcatccctgcctgcatacaatcagtaatcaagcaaatatgttcgtatcccttagcttgaattaaagctctcaatgcgggaatttctacgtgatgcccatcagcaattaattcacaatcagttaagcgactagaaaaggctgctccaataatattaggtgtatgttgcgacaagtaattcataccattataagtatgggtaaacatgctagctccagcattaactgcgttattagcatcttcgaagttactacttgaatgtcctaaagagactgttaccccttcttttactgcttctctaataaattcacagcttccttcacgctctggagccattgatattttgattagcatattatcactagccttacgccaaccatcgaaaagcttaatatctggatcaaccatatatttaggattttcagctccaccatgttcaggtgtaaagaatgggccttcaaaatgaagtccttgaattttagctcccctttcttgacctctatgttctgcaaacattttgcaaatattagtcaaagtatcattacttgcagtaattgtcgttggtaaccatgaagttaccccagccgcaagcaagccttctgaaattttgttaataccttgccaattgcttttcattacatcttcattaagtaagccatgaatgtgtgtatcaacatatcctggtgcaactgccttaccaggatattcttttattttcccattaggcttctcattttctggataataaaaaccaaattttccttcatcagttacttctaaatatccaccaaattctgttctattttttaggaaaaactttgccgcatgaatataataggtcataaatttatctcttctttcataaaagcgctatcgttactattcatatcgtgacgataaatatctttaaagtcaactaaatagcgaaaaattttcatgatttttcgttataatgtaaataattaaacaaatatttaggtggtagatatggcacaaactatacaaggtcgtcatcaactaggtgctttagttggtgcgcaaaaagcagaaaatttttatgaattacattattcaagtggcgaaacagctcgcttatatatcttgtcagatagtatttttcgtttttatcttgatcctaaaggcgcttttcaagccaatgccttggatttaaatttgtcatcatttgacaattcttatcatcaaaaaagtagtgctaaagcaactagtgaagccttcattattcaaactggctcaataaagttagtctttggccaaaagccagcaactttaacaatttttgatgaacaagtccaccgcaatcgtctaagtcaaactagtccattagaaattggtgatggtgcaagtatcgaatttttaaagcaaaatcaaaatgaatactattatggcggaggccttcaaggtggacacttcagtcataaaggtaaaaaaattcaaattaaagatttaaaagttgccggaaatggtggtgttattaacccaattccatttttctggtcaaatgccggttttggagagttacgcaacactaattcaaatggaacttatgattttggctctaagaattcaagtaattgtttattgagtcataattgtgaagaattcgatacattttatttaattggcaactctcctcaatctatcttacaaaagctctaccaattaacaggcaaaccatttaatctacctaaatacgctttaggactaggttatctcggtaactttttagattttacttggaagaaaagcgataatactaatcgaactgctactaaatttgaagatggtgattattatgaaaaagccactagccctgaaaatgttgctgctaaagcgtctttaaatggagaagaaagtgcaatcttttcagctagagcaatgattgatcgctatcataaaatgaaatttccacttagttacttcattccagattttggctcacaaaaaccagctaaccttgatgaattacaaagctttaatgaatatgccttaagtcaaggcgttatgccaggaactgcccatgttgaaactttattagctaatacccaactcgcttatactaataaacaaaacgaggctaaaacatattctgctttagctaatagtttaaaacagcaaagaccacttgttttaactaataatggtaatgccaaaagtttccacactagtgccttagcatttggagaagatggaggcgaatgggatacattaaagaatcaaatcgctagtttacttggtttatctctttctggacaagctattagtggatgtgcagtagatgggcttcgtggcggaggaaacgcaacggttagtgtacgtgattttgaatggaagagtttcacaccattgttattcagcatggatggacaaggacctactcctaaacttccatttgtatacaacaataaaatttcaaaaattaaccgcgcctatctagctttgagaaagcaatttagttcatacttatatactttaattaaaaaagctcaaaatggtgacttgattatacgtccacttttcatggaatttcctcatgaaaagacaaattattctgatgaatgggctaatgagttcatgttaggagaagatttgttaattgcaccaattactgacggacgtgaagacgaaaaaggatatgcaattaaggatcgcttatacttacctgatcatcgcactatttggattgatctatttaccggtaagaaatatgcaggtggtagagtatacaataatctatcatttccaatttggcaccttcctgtttttgttcgttcaggagcaattttgagtcaaggtaatcgaatttttactatctatcctcaaggtaaaaagactgccaaaattttaaatgataataacttaaatagtgatgaaacatacacaaccactattacttctaacttaaatgatgatcgtttacacctatcctttgaacctattgaaaatctttgtgatggagttgccaaagatcaagcaacttatttaaatattctaattgatcattatcctggaaatgttagcctcaagataaatgacgaacccgttcgtcttaatgaatcaggctccttcaatgcctttttaactaccaaagaaggatattactttaatactaactttattgctgcaccagcttttagtgattttactaagcaacgccaaactgctttacaaatcaaattagcaaaacgggacattactgataccaaaatcgatatctttattgataatttccactatgttaaagctaatgaagctcatgctatcatcgactcagctttgcgtgctccagggaagccatcaattaacccagataaaacaacagctcacagcttaactgcaatttggcccaatgatgcccaagttcaaatcgaagtaaacgacttaatttatgatgggattagtggcaagagctttacctttaataacttgaagtctgaaactttatataagatgcggttacgttacttatcacataataaggtttctgaatggtctgattacttcggtggcagaaccaaacctagtcaatataaatttgcggttaaaaacgttaaaatgcattcctcaatgctcagtcaagaaggtcatgatgtcgcattagctactgacatgcttcctgctagtgaatggagaaccgctaataagttgacgaatgagggtttaactttaacttttaactttactcaagaagaagagttatcaagaatggtctatttgccaagaactgtcgatcaagttggacgaattatcaaggctagtttagctatttcaaaagatggcattcattttgaaccttatcgtgatgaaattaattggccaaatgatcctaaaaacaaagtcgttggtttacgagatgtcaaagccaaagctattcaaatgcatattactgaatctagtgatggtttagtagctgctaaacagttctatttcttcaaacctaaaaaataattttaatataaaaaagcataagcttgcgtgatttactttcttcaccttgcttatgcttttttactaactttttttgctaacaaataacttgttaaaggtatagttaatgctaccccaataattgaataagccattatcaaaacttcgttaacaaacagcttatcatttaaaatcttgcccaatggataatttaaacgcatataccaaataaataatggcaaaaagctaccaaataatccaaacaaaatagtatttacactagtacctaaaacatcttttccaatattagcaccacttttttcaagttgattacgtgtaacctctggattatgcttttttaattccaaaataccactactcattgctacacttgcttcacttattgcacctaatgtactaaaaatggcaaccgtaatagcaatcgctggataacttaagccaggatatggtgaaagaccaactagctcttcacctgcttcatcaccaaagcctgctgcttgtgcaagatattgcaaacaaataataactaaaattgttaccgttgcaaccaaaatagcggcataaaaggaattcttggcaactatcatatcatgtgttcctaagaaaataatcgctgctaattttaaaggaataaaaattaaggttaatacaaatatattaattccccatgaaattaataaagccactaaaacaagcagaatcccattaaccatcacactcaaaaagctgttaaatcctgtttttccaccaattagtaccattaaaacaaataagagcaaaaccaaagctgttaaagtagtcatcttagtcccctcttttctttaaaaatactaaacttgttaaactagcaaaaataactgtcaaacatattccaattgcactcattaaactttgaatagcgccaagtgataaggtgaactcaaaactaaaagccaaggtattattatcacgtaaatataaaatagtcatcggcaaagcttcagcaataaaaattaaaactaaaacattaataagtggtcccataatttcttgacccatggttctaccacttaataacaattgcttaactgttaaatcttttttatgttgtgttaattcatatagactagaaactatatctgttgcttcatccataacggcacctaacacccccaataatgcttgggctaaaaacagcgaacgtggtgattgcgtagcatagtctacagtttcatatttcatccctgcttcaccagttaatttcattattaaatagcatattccaaatgaaacaaagaccccaactaatgttgcaaaataagttgccagcatctttttatttagcccctgcacaattaacaaagacacaaaagcaaaaacaatgactcccaatccataaattgcaaatatctctgttccattttcttgaatatcaaattttataatgaaataaaatataatccaacttaaaactaaagatagcactagccaaaaagtattttttccggcaattactaaaagaagcgttaaaacaatcgtcgcggccaaagctaaaatccaatctctttttggacttaacaaactaatttgtcctttattgaaggaaactaataccctttctccagaccgataagcttgggtttctaattgtgattttacataatgattttttactgtgtaaatttttccttgatgtttaccagaaatcacctttaactttaaagtttgtactcgtttttcatcataatttttatattcatcttcagtcttttcggttactcgatcatttaagttcttatttacaataattgctgtatccgcataagaagagggcttaaaataaatccagctagttattattaaacccaaaaacaagacaaaaagtgtgaataaatttttcttagttagttgctttttccacatcatgttcttccttcctgttattattttacctactaaaaaaagatgacctaaaaataggtcatcttcttattcatttcttaaccaagaaatctttcccaccagtgctttttcttaggaagttgcatatctgctaaagttcgatgaacattttctttagcacgctttgcggcgttttcttgagccttctttaaaatcgcaccacgtacttcatcttcactttttgacatatcttctgtaacttcgcttcgcttttgttcaggtgtcttttcttcaatttcttcatcaaagaaatcttcatccatctctggcaaatcttcagttgcttgtggagcagctaactgcttttgactatcaatcaatgcagcattttgtttttgcacttcagcaacctgcttttgtaaatcagcaattgcttgattttgattggcaatagtttgttgcaaagctgataatagcttaactacttgcttagaatccattaaggcattagcttgttcttctatttttttatcagcttttttttgatcctcaacttttttgtcactcactgcaaatatttgttgggcagcatcactcaacgttaacccactttgcttagctaacttatgaaaagctttaagatcggcaatattttgagcagaatacaatcttgcacgttgactagtacgagcataatattctgaatccccagttgttttttcaacaattaaagaatactttctcaaagttgccacactaattttaagttcagctgctgcagtacttggatttactaattctttttcattcagactcatcaattattcccctattcaggcttatgaagcaaagtttttttgtggttatggcgttcaactgccaattcaatcaagcgagaaatgagatcggtatatttaataccagcttcttcaaataatttaggatacatactaatgttagtgaaacctggaagtgcattcaattcattgaaaataacttcatgatcactagttcttaacatagaatcaattctagccattccactacattcagttgcacgataaatcttttctgcatttgagcgaactttttcaacgatttctgctggtaaatctgctggaatttgcaaagtagttgttgaagaatcatcatatttatttttataactatagaatgatcccttagcattaataatttgaccaacaccagaaacgataatatcatcattacctaaaacagcagtttcaacttcagtaccagtaattgcttcttctactaaaactttatcatcatacttaaaagcttctgcaagagctggcaaataatctgattctgatttaacatgagtaattccgacacttgagccttggttagaaggcttaacaaacaagtcagttcctaacttttcagaaacatatttataatcaagcttagaattatttttatcattgtattcaaaacgcttgattgccacccaatcagcaacaggtacaccggctctttgagctaaaatcttagtaaattccttatccattgtaacagctgctgctagtacatcatccccaacaaatggcttatcaagcattctaaagaatccttggataacaccatcttcaccaatatttccgtgaacaattgggaagtaaacatccatttcaggtaaattagccaattgttcaaagttggaaacattagctaatttatgtgggtttttaatagtataagtagggtcgtcccaaacttttttggaatcttctaaacttgcaaaatagttatccttagtcaaccaaattgggtatacgtcatacttttctttatcaattgcgttgtaaatattgtggccagaaacaatggagacctcatattctgaggagttaccaccaaagattaagccaactctggttttatctgtcatttttttctcctttaattgttcgttttttatctccttatatcgttcaatctttaattatacgcatttacagcatgattggcgtatttattaggaaaaaaactagaatttttttagcaaatatgtttaaattgttacataaatattacaaaaccgttacaaaaagaaatgtgatatcatattcttatagaaaaggagggcttcatccatgaatttcaaacgaaaacttgcaaccatttctgcaagtatcatgttgctagctccaatatttactacaattatcactgcaccagttgctagtgcagcaacttttactagctctgaacttaatactattcgttccttccaaaaccgttattcaagtttggatcaaacagcatatagtaaaaataatatttatacaattactcctaacttaacagagccattttctgcaggacaaatttctcaaaactacattgattcgcaattagcctggattaactactatcgtgctctttttggattgccaagtgttactgcaagtaaaactgaaaatcagaatgcgcaagtggctgctgcagttatggcagccattggagctaatccatttcaaagtcaacacggcttaccaaatgaatctaaacctagttacattagtgaaagtgactgggaaacagcagttgatttaactaaaaattcaaatcttaatttcaacattttaaatcaatcagctggagatgtaattacagacttcttaactgacagaaacaatttaacaggaggagatactggccacagagcctggattctctcaccttggctttatacaacgggaataggtgctgcttatggagcaaatggctatcgttattctgttcaaagagttctcaatttaacagatgtcatgaaaacagctaccaaatcaactattacttatccaagtgaaggggttttcccaattgaattattgagtggtggcaatatttactggtcattttatttagctaatgatcaaattaaatcaactccaacaataaccatcactgacttagataccggccaaaaaacaactgctacaaacgtgcataattatagttcaggtttctatggaaacttttcaactatcattacttataagcctggaaatataagtttagtttctggtcaccaatatcaagtaaatattaatggaatttactcatatagcttcaagttatttaaccaagttgctgctaaccaaccaagtttaaatacttccacaaagaaatcttcagctaatgtacaaaagcaagttgaagaaattgctaatagcaaatcttccactcctgctgaaaaagacgtaaaaattaaatcagctttattattaaaggcagaagaaattagtgattctcttatgaaaaatagaattacaaacactactatttttggaagatcttatcaagatgataaaaacttctataatcttggcaaaaatcaatggtttagagatttttatcgagtttcaaatccattaattagtgctggaattttagattcagatgacaatatgcttgataaacaaatttacactagtccatatgctaacttacaaacaaaaacatatgcttatctcaagccacaaactagttatgcatatggtcaaagtataataattggtggaattacttggtattacctgggaccaaatcaatgggttcaaaaaattccaagtaaaaatccagcatagaataggcattttaaatactttaaaaaaacacctagtttaaactaggtgtttttttcataaactataaatcaatccatttattttgtagatgttatctgccaaggaatagtattaattacaaaaataattgctccaaacataacatattccaaaaatacagaacttgctaactctaaccaatatccaaaatcaaggagagttatactttcaacattaaaaattaatggtatcatcgctaaaatgacataaatcgtaatcattaaagctcctgtccacatccctgctcctgttacttcatgaattatagccttcaaacgtagcttttctctcatttccatcaatgtagaaatcaatgataagattaaaacaattaccaaaacagtgttaatgattaaaaacatagttactaaattagcttgttgagtaacatctgccaaatcaaaagctgaaataattgtatatactgagctatctccttgtttttttagggctttcataacactctgggcttctgtatctgaattagaatcaatttctttattcaacgtagaataaatttcatttgctaaactcgcattatcagttttaaaccaatggattcctaaagtataatctattaattcatcagataatacttgagtttgatttgaggtcaataaattagagctactattctttttaccattaactagcactgctaaacgatcaaattttgcattaatctgtgcatcaattacagcttggccattacttgtccgtgtaattcccttcataaatgatgggttcattaatgtaaaactaaataatattaaacttacaactacaaaaatcgttgcaacaaaggatcttttataagttctattttgttcagcatcaagacgtctaagctctgaacgcgtcgtttctgccatattattctccctaactgtaaatttctttaccttcgtcaaacatgtggtcaatagcaaaatgaatgctaccgatatctgcattccgaattacttgatgcccttcatcaagcaccttcttaatttctgaagcatcataattcataaaaacgcccattaaagtcgaagtcataaaatcagctatctcttcagggttaaggctatgactcttacgtttaagataaagacgtccacctccagctgcaataaacgaaatacctgaacgaatattatcaatttggtctggagtaaattctgaaattaaatttctttcagtaatccatgaattaagcatctggctccaggtatcaagagtcgtattatcactaaatgcttgtctaattacttgatctaatccattatcacgaattcccaaggagccaatgatgtagcaaaaagctttgacctgtgtgaataaattttgcttttgatctacgacatttgtataaacttcatcccataaagtattaaataagttgtgcataatatcagtagttaacttttgtttatgtggatagtaggattgcaataaagacttggaaatctcagatttttctgcaatcatttgaagcgatacattatctattccatattcgcgaatcaatttaaaagtattatctaagataattcttctccgcttcatattcttatgtcttgccacaacagtcaacctctctatcaatttgtctatacaattataaagaattatatcaattacttctagctttgtatagtaataaacaaaaactgacccttaaaaagagtcagtttttcaatttcttaattaataactaatcagttacttaagtctattttgttcatcaaaaatttggtgaattgaacgatcattgtatacataatcaattcctcgtgcaagtaattgatcaaccgatactctaacaattctatctggatacttttcatgtttaatagtatcagtaaccacgatttgttcaattggtaacttattcaaaacatcaactgcatcgtgtgataataatgcatggctagctgcaacataaaccttagttgcaccagctgctaaaacagaatgagtagatgaagcaactcgtgaaccagtatcaattaaatcatcaacaatgatacactttttaccttttacatcaccaatcatatcatgaactgaatcatcataatgagcaccacgttgatcaacaatcgcaattggtgcattaaagttagttgcaaagttacgagctaacttagtgcctgaatgatcaggagaaacaatcactacatcctcatcatcactagtagcaattccattgtctaagaagtattgtgcaagtaatggcaaagcgtgtaaatgatctactggaatattgtaaaatccttgaatttgtgaagcatgtaaatctaaagtaattaaacgatcaattccagttaattgaagtaagttagcaactaacttagctgtaattggttcacgagaacgactcttagtatcagaacgagaataagccaaatatggtaccacacaattaatccggtgggctgatgcacgatgtaatgcatcacagactatttccaattccataaagttttcgttaactggatcttgaattgattgaataacaaatacatcacaaccacgtacggtttcagcaatgtttactgcaatttcaccgtcactaaaatggtggacacttgtttcaagcaaaggcatatgcaagatattagcaatcttttcatttaaagccttattaccacctaagccgattaacttcattgggtgtaacatttgatggagttcttctttattcattgtatgcccctttagaaaaatctatatacaattctattatagacaaaaaaagactttggataaacaaagggatttaaaatatttaatttttcacaatattttttgctataatatccaagtatattatttaggaggattttatgagaacatttagtattgttttattattgataattgcaattgaacacttatttatcgcctttttagaaatgactgccactccccaaaagcaagccaaagctttcggcgttgatgaagaatttttaaaacaagctgatgctagaatttctatggcaaatcaaggaatttacaacgctatgttagctgtaattatcattttaggtcaatggatttttactggaattaatactgtctatgctaacttattattttcaagcttcgtctgtgttgtaggtttttttggtggcttaaccgttaataaaaaaatttactttgttcaaatgcttcccggattagttgctttaattattagctgcttaggactatatatgtaaaaaagagcgataatatcgctcttttttatttacaaaattctttaattaaatccagcattttaaaactatgaactgtataactattatgggtttgtctaggcataattaccaatcgtgcattttgcataatttgagaataccatcttacatgttcaactttaacccaatctttttctccgacaacacacaaagttggcgtaataatttttcttaatttttctggttcaattaatgtttctgttaattcaacttggctatctggatcccgcttaatgaatctttttactccttcaacggcatagtgataaggtttaatccctccaccatgtacaaaaactccagctacaattgcctttttaagcatattgggatattgactggctagcattaaagttacaacaccaccggcatcatagccataaatatatggctgctttaaatcaagtttgcgaataaaggctgctaaatcactaacttcttcttgataatgctctgctgcatccccttcacttaagccatgtcctctcatatctaaaacataaacagtatagtataaagataatggtgccaaaattttatcaaacattccaccatctaagtggtgtccatgaagtaagattaaaggttcccctttacctaatttttgataatataattcaatattatttacagtaactttcattcttattcctaaatatccttagtcaacatttgaattcttgagcaaaattttattagcttttttcttagccttttctttctcgtgctcttgcataatactttttataattttactccaaattaaataatttcctataaataaatcagatgttttctttaaattaggcttatgaacaattgaatcagatcgttgccaataatgataataaggcttttgcgtataataaacttttcttgctattgaaatatatttaacgttaaaaatctgatcctccataaatgctacatctgtgtcaaaaagtaaattatgctttctaactagctttgttcgatatcctttattccagcaataccctttcattggagaatcaaaaatatcagtaagtttcataaaagcatttcctttagtcagcacaccactttccggtttaccaacaacatgacttcttcccttaggacgatctatataataaccacaggaaactaaatcacaatctgggtgtaatttaaaagctctcaagaaaaaagaaacatatcccggatcaacaaaatcatccccgtcatgaaaagtaaaatatggggtatccacttgatttaagccaatatttcttgctgaagaaggtccaccatttttagttttaattacagtaaaatatggaaattttggccgatattcttgcaaaatttcgttagtctcgtcagtagaaccatcatcaataatcaagagtttaaaattagattcatcttgatgaagtaatgcatctaaagcccgtggtaagtattctgctaaattatagaccggcataatcacggttaactttggttgttgcaaaattcggctcctccttttcttaagattatatcatcgaattagtttaattcctatttcaagtaaaagcttaaaggaagttgtaaaactattaagctttctttgcgaagttagcttctcatttatcaaaacaggtataatataaccataaaggagtgaaatgttatcatgaaaaaatttatggcatttttagctgcaatgataattgcaactggagttagcttcactaataaaaatactgctaaagctgacgatgacactacacctgttgtaactttaggttcatccttaactagtagtcaaaagcaaggtactatcaataccttaactcaatcattaaacggtgcttcttacaaaactattacggttactggaagtgatttagttaaatatcttaatccatcaggtgaaacttttaccacttcatctggggtctggtctagtgccatgattcaaaaaacaagtagtggtagtggtattaatgtgaaaattttggattataacggttcaaacaatattactactattacagctaaccaatacaaaaacgctgctttaactgcaggaattactgatgcaaatatttatatcactagtgccacaccaattgatggatctggtgctttagctggtatttatgctgcttatgctcaatccggtaatactcttaatcaaagccaagtaaatgctgctcaaagtgaattaaatactttaagctcaattactcaagataacaaaaataaagacggctacagtgatgcgcaattaaataatgctgttgctggagcaaaagccgatatggcaaaatatggttcaaatatcactaataatcaaattactactattgttaataatcaacttgaaaagaataatttaactaatgtcattactaactcacaaaagcaacaaattattaacttattaattaccatcaaaaaatctggagctttaaattcaaacagttttaaagaacaagctcaaaaattatctagccaaatccaagaaggtgccaaaagtattttcaacaaattaaattctcaagatactaaaaactggattcaaaaaataattgatgctgtaattaatttctttaaaggattattcggtggagtaatcgttctaaaataaatcgattctataaataaaaaagttttgactatagtcaaaacttttttcatatacttagaaatgtttaggtccatgcttttttatccgccaaaagtggaataaaactgttatccctaaaataccaaaaacaataagtgcaaagatactatttggtatttcaaactctagtggtggcaaattaagtaataattttaaggcaataattccaattaaaatataagccataggttcaagttcaggaatatgttccatcaatctaataataatttcggctactccccgcatgcacaaaatcccaatcatcccaccgattaagacaatcactggattttcagcaattgctaaagccgccaaaaccgaatcaatcgaaaacacaatatccatcagctcaatagagataactgtccgccaaaataaagaaaagacatgctttttatttttatgttgagaatgatgcttgtgctttgctttaactttttcaggatgatgctgttcatagaagaacttaaagcataaataaaataggtacacactaccaactaatttaatttcccaaaaacgaattaaatatgtgcctataccaataataataaaacgaaaaagataagctccccataagccataaagaagtgatttttctttctcaagtttggtaggcaatacttgggtttgcgctgctaagacaacagcattatcaacagataaaagacattccatcaaaattaatgttaaaattatcagccaatctttaccgctagtaataacatgggtccaattatttatttcaaaaaacggttgatacattttaaaaattatcattcagatgactcttttctatttttacattttatccatataaacatttagtgctttatcaacaaagttatttccataattatcttcatgtccatgagtccattcaaactctgcatttttaaattgtggtaataaccttgatatttcttgccacaattctttgttttttaactcacccttacttcttttccaaccattatttcgccaagaccaaatccatttttcagttattggtcttaacacataacgagaatctaaaacaaagattgtcttcttattattaagttttaaagccaagcttcgtttcatagcttgaataaagccagttaattccatctggttattggttgccccaaactctccaccagctttgctaactctttttccatcatattcaattaaatatgcccatgctgccttgtcgtttttttgaacatggctacctttaatattcccatgatttctacatccaccatcactaaagataactacctcgtattgactgtaatctgctttagaagtagcggacttgctttttaccttaggcacatcgtctagtaacctgctttgtgctttaactttttcgattgcggcgtttaaattatcttcactgggcttcataatggctcttttttgatcagtggataagttcaaatattgactagcttctaaaagattactgaatgatttgtattcagctccgctaaaaccatcaacttgttctttgcactcatcccaagtccggaaaactccaatttttcgacctttttttactgcataaaacttcatttattgctccaatcataaataagtctcaattaatgttaaaatactactatataatacacaagaaggaggtcaatatgctctttaattctcgaaagtatattgaagaaactgaacacaatcgaattaagcattctcaagatccttcaatgtttgaattgatcagcttgggaacattagccagttttcctccttcacgctttttattacgactgcatcccaataaaatcacctcatattccaattataaaattgaaccaagtacttgccaacaaactccaattctatatattcatggttttcgtggtggagattatacaactagagtattagtaaaagaggctggtaaagccaagcataatccacattatttaaaggttacttgtgatgcagtcggcaattttactcttgaaggtacttggacaggagatcaatatcctattgtacaattagtctttcgccatagaattgctggcatgagtgctatcagctattatttaagtcgaattctaccttttttgaaaaaacaatttaaatttgatacctattttgcagtagctcactcccttggagcacctgctatagttgcaacagctatgcattattttaaacataaaaattttccgactttaaaaaaagcagccttaatagctggcccttttgatggtgtaacttatttaggtgatattcctaacgttaattatcttggtgaaaaaggacgccccattgccatgaatttaacttacttaaagtttattttaggtaaaaaaagaatttgtccagatgcaagtgttttaaatatttatggaaacattttggatgaaactaatactgataaattcatctcagttgtttcagccaaaagtattcgctatattttggcacctcagttaaagttttatcaagaagttgaaatcagagggacaaacgctgagcacagctggttacatgatgatccatttgttaataatattattaatcgatttttaggtttaaaatagatacaataaaaagaaatggatccgtgtactttataatttatcatttattagcaataatcaaatggaggaattatctgagtgtttttgctcaaatatatacatatcattatcattagtatcaatactattttagctttttatgtagttttcagaagaaaaagatctgtagctactgcctgggcatggttaattattttactaatttttccaattttaggctttattttatatggcttttttggtcggggattatcacaagaaaatctttttgcaattaataagcagaatcacattggcctgcgaaatgtacaaaagatgattccccgttttcaaaaaagggctgggaaatctgatactgcccataaagcacaggtagcgattgaatattttaaccaaaaccgagaagctcctctttctaaaaataatcaagtaaaactttacactgacggacatgaaaaatttcaagatttgatgctagatattgaaaaagcacgagaaacaattaatgttgaatactatagtttttataacgataacattggtaatcaaatattaaatttattagtaaaaaaagctaaggaaggtatcaaagttcgtctaatttatgacgcttggggatcatttggagcaaccagtaaatggttcgataaattacgtaaagctggtggagaagtattaccatttattacctcacgcaatatgattcttagataccgtattaactaccatttacaccgaaaaatcgtcgttattgatggtcgcattgcttggactggtggttttaatgtgggagatcaatatctaggaaaaaagaaaaaatttggttattggcgtgatacccatgttcgaatggttggatcagccgccctacttttacaagagcgctttgtcatggattggaacgcttctattactaaaattagccaagttattactttttcagagaagctctttcctgacttaaatgaagatgaaattactgaacataatgttgcaacccaaattgttgcagatggtcctgacagcgaaataccatatatgcgtaacggcatgatgaggttaatgctcctagcaagaaaaaggctttggatacaaactccttacttaattccagatgacgccatgattgccacttggcaaattattgttaatagtggtgttgatttacgtataatgattccgtctaaacctgatcacccttttatttatcgagcaacccagtggtatgctaatcaattaactaaaatgggaattaaaatttatatttatgataatggtttcttacatgccaagacaattgtcggagatttcgactatgccgttgttggctcaatgaatcaagattatcgttcatatagtcttaattttgaagatatggctgtattttatgatagtaatattaatcatgaattggctcaaatattcgaagaagacatgaaaaatgcccatttactaacaattgaagaaattcaaaatcaatcacactatttacgttcacttcaaagcttttcacgcttattatcaccaatactataattagggaataccacataagtaatcctttttattttattatttgagattatctaacaattagaaaaaaagcgtatagtcgtaagactatacgccttttctatcacttaaaatgagtaatcattaaaagtactaattttttcactgactgccaaagtaaattactccacttttttaaccaattaattggtaccatcataaagaaaaacattatatcctcctttctttataaaaagcttttatattaaattcccttgaaacacgaaaacaatatactatagactaaaagatattatctaaaaactgaaataacaaacagaaagggtttaatatcacatggtcatatctgatttaactgaaaaagataaaaaaaggctaagaaatttaactctgcatattgctttaactagtcctttcataaaagtaatttatgctatacttttgtttttaaacttaggattttttattttttattgcacatattatggtgctattaatgcatttatatttacctttaatctaatgatagttcctaatttattttcaatactcgttattacatttagtattcttttttatttaataatgtggcattttcgtaaaaggaaacttccccaaaaatctattatctttttaactaaagaagaaaatattgatacaagtatattccacgatttaaatattaaaatctgaaactgtcaaattttttgtgtaaatagatttttctcgtagattgattttttaatcttttatttaatcaaagtaggattctaaggtatcctgaacctgaaatattggttacaatttttccagtcgtattaagacgtggcgttagtgccactccagagtcggtaataaataatatatattcaacaccagtttccttatcaatagcctttttaaaacccatcatatcttgtaagtatttcattaataaacctcactctattctctttctctcttttctaccgctaacaatttcagcaattggacttttattagtttcatatcaagtcgtttatgaattccataaattagagaaataaatgatatcaataaaggaactaaagccaagcttctaaacatgcttgggagaagttgaatacttgaaaagagataaagaaagatacccagtaaattaggaataactatcataaaagatataaaatttgctaattttacatctctccttgactcttcttgcaatttatttgaaacccatatatagacatattcgtccatataatttggaggtaaaagatagtattcatctgatgataattcaactctgattttattaaatcctagtttacccaatctttctttagtcgcattatcaagtctgtcagttactagatccgttatttgatttttgaaaatcagaaattgtttatcacaatgatctttaactgcaatattctgtaaagtatttaaaatttgtttctttaaccgagtaaaatcaaaataagaatctaaaattatcaacttatctgcaacatcagaattggaatcaatttttgtattctgctcaatagcatgatcaattgctgaatttaaaactatatcaagtctccctcggttaataatcttttctgtttgcttctctgcttgactaaataatcgtttcttttcactgataagacgtgatgctttttcatcaagatctttatttgatatcattctgatctactttctaattttgctaacctaaaatacttaaaagtttttcaataaaaaattaaatatcttagatccgatgaaataaattaccaatggaacaataatcataaataaaatcacatatataattaattctgagatcattacctgatgatcagaaaataaccaataaatatatatagagatcgcaagaatataccaaataacaagcaaaagaataaaaaaggaatctacattcatttaatcgattttctccttaataagtctattaatatgcaaaatcattagagcagtaaaaattattgcaactaatgaaataaatccattggcttgtccttgaaaaatagatattaaatatgcgattaaaaatgtaaccacaataagatcatctacaaatatcattagaaaatgcggatatcttacttttcttttcatctttctcctcactgttgttttcttttattttgataattcaataacgcaacaaactataaccgaacacataaatacaatttgaactattagcaacgtatctctgctatacttctgctttttaagtaaaaatgtatatatgatttgcaacagtattaagccgaaaatataaaaaaattgtattttcataatcttccctttgatcaataacttttttaatttttcatataccagtctgaatggaaataatataaagctcttttaggtacatcatgccagcaatatttttcttttcctgatttaatgaaaagaccgttttttcgcaactcgactatcttctgcttattgctcatatgtgtattgagtccaaaataattgaatacgcttttcaaattattggaaaacataagcgagtccccatatttgtttataactttatatgcaaaattgggcttggtttttagtctctgctttttaagcagcctctgaacatgtcttttgctaagaccaatacgtttaccaatttgaacagcatcgtaaccttcttcaagcaaacttataattgctttttgttgatcagcaacttcaggctgcagctttagaatcttttcgcctaaggagtgaagtcttcgtaaattttcatcatcatcaggagcctgtaaaactgtcctgtactcatgctctacttcttcgactaggtgtaagagtttactatttggtttaactgaactagacatttgctcctatacctctatttattatttaaaaaggtacatctaaatcatcgtctaagccgagatcatctaagctagtaaagttgctatcatcagtagatttctgatcttctatcccagttttcttcccttcggagctttttccgctttgatctaaactcatatcatgactagcgccttccgaatccgttgaaacgttgcccaaattattgttttgttcatctttatgcttagggcgagctagaaggtcaatagaattagcaatgacttcagtaatgtacttcttttctccattcttatcagcatatgtattgctagtaagttttccagtgacgccaattaaagttccctttttagcgtactgatggcatactcttgcccaatttccaaaagcaacaattctaaagaaataaacaacttccttgccattacggtctctgtaatcattcacagcaatattaaaagtcgcaacatcttttccagacttagtagcttttaattcaatatcctttgtcgttcttcccgttaaatttacactattcataattaagcctctctgttctccgctacccatttttgacttgcttcagcaaattttggatctcggctgtcaaatttgtaataaacctgaggtctttgacctacactctttttaatgtccctgattacatggctataccaataccgagcattgccaatcggaatttcagacaaatcttggagaaatgcatcaacacactcttgatcaaatttcaccagttgttcaggaacattcgatttcatatcaatttgatcctcaattgcttttaaagaaacacctgattcaatatcaacgagtgcagctgtaattatggcttttccttcactgttggcaggagatttctgaatatgagcaatgcccatctgtttatccaagtactctatatcaacacttggcattgccacttttacaaactttttcaaattatcggcccataaataagcaagataaccgtaagtaccaatataaatatctacctgtgccattattctatttgctcctctttaatttaattctcgtcccaatgtccatcttcctttagccaatcttgatttttgatctgcatcattaactaaatgaatttctgcaggtctatcaatacccggtctgatagcatctaatatgcttaaataaacatcagcaggatttccagcagtaaagatattcagattggttctagtataatgatcaatcaattggttatccaaagaggccaaatcagagtcaaaaatatatccgccatagccactggaattcaacgtatctaaaggtgtacctgtttcaatatcaactaaaacggccacaattttattcatgtcaaaatcaatattatttgcaattccaagagatatattttttagaacatcgaattgaatttctttcactacaacttttttaaatttatgttcttttgatacataaagccaacctaagtaacttttgccagtccattttgaaattaattttttattcgtcattttctcttctcccaatttaactgatttccattcttctgcttttaggactctttacgtgtactttgccgtgcaaatgactaacgtacttacagccaaacggcaactcaatccaatatgctttaataggctgggttaaaatgccctttttagccaattcattttggtttttatatttgaaatcaaaatattgataagcatcttgcatgtcagttacgtatagctgaaactttcgatcaaagctgaaaagattccatttgaaaatggtattgtctgccgaagatttcaaaactgaactaatccaatacataggtatcaacgttttagagcaaatcttcgcgtcagaataaccgcacattttcatgaaaacaattatccttcgccactttgcaggcaatttagaaaactgatctcttctgattcggtcacttatctcgttataattattcggcatttgaaagtgttcaagctgtgctaatgctttttgaaaatcagaatcattgctaggtacgtttagcaacccattgtatttattgctgagctgtagaatttttttatcaagaacctcaatttgacgatttgcaagttgtaatggtccagaattaacttttcccatctgttgctcctttcaaatcagttaaagataatttttgtcctttgcgattgattacaaatttgtaagttttattctctaactcaaatctcactagagcaggatcagcgattaaaatcataggcttgtcctgatcatttaatttttgaacaccaatatctttcatgattttataaacgcctactttggtccaatcaacttttttagccaaagcatgattatctcgtgcctttaaagcatctagcttttcttgaaccggttcttcgcgaactaaatacattacttatcctcccttgctttttgaaacgcattaatgagcgttaacacggttgttaacgcaaaaactatgattatcgaaatcaaaataaacggtcgcatcacattttctacgcttaaataagacttgctgccaatcggaataagcaatagtaatagagccactatgagcaccattccggattgtttccaaagccttttatactcaaaaaacgacattttgaaactttccaaaaactttcctctcaaaaatactcctccaattagctattccaacagatcatcaattcccgaatcatgatagagttgcttagtttcttcagcattcattgtgaaatcactattctcggtatctttaaattctgatgtttgaatcgacgttgaactatttgaattttctttaatgtctttttcatcatcaccttcaattgctctgatagtctgtttccactcttgttgcaactcctttctcgaagtgtcagtattttttttgacagggtgttctttagcatatttatcccaatccattaccttacgtatttttttatgcgactgatttggcgaactagatcttttttcggataaatccagttcatcgttaaagcgacctgcaaaccaattgttgccatttagaatgtatcggaacgatatatcattaatttttaggtacttcaaatagcattccagttttgagcgcataagcaggtaagtatgttcacttggattgtctaaaatccaatttttataaaattcaaatgcttcactttctccaactttttttggatataaattccagagatttttaaagtcgatttcgatttgtgactcaataatagtagtctctgtgtaatctatggaattatcttggtaatctcttggtataggtccggaagaaacttccgaatctaaatcggaactttcttccgcttgcatttgtaagtttcttccgcttggattaggaactttcttccgtctcgatctggaagtttcttccgaatgcatagtggtaggctttttagcagtattttcattcgaaaacaatgaattcaatttgtcatagtcaatcgagtaccactttgttctatcaaattttgctttgttaaaattagcagtcaatatgatgcctttttcaataagtgaattaaaacggtctcttacagctctttcggttaaccatggaaattgattttgccactcatcaatcgtgttatatatccactttcgaccttcaaattcattatttgagcgtgatagccaatactgaacttgctgaagcatgacagcttcattgatattcttaagagcaaccgctagtgaaggtaaaacttgtagaggaggttcattaattaataagctacttgtgtttgatactttaatattcatgttcatacctctacttgtttcccaaaaaactatttaaaatgtcataatcaattgaataccaactcttttggctaaactctgaactaacaattatgtgtttcttttttagggaatctaaaaaagccataatatctttttctggaagccaggggaaaatctctttccaatcttgaaattcaataggtacccatttttgaccttcaatttctttgttcgcctttcgcaacttattttgaagagcttgaagcacaattgcttcatgaatatcgcacaatttaactgcaagtgaaggcaataattgtagtggttgttcattaattaataatggacttaaattaattgttgttgacataatttattcctttcgttttaaaaaagttgttttggatatccaaagagttcgagctccagtttaaaagtttgaccagtcactagatactctcgtaagccgtgacatgtttcagtaagcttgattggtagaactacttgatttttgtaaaacagatagcaaactgcctccttttctccatctaatgtccagccaatatttctcataaaagtcggatcttttatcctgcctttagaatcaacgagcgcaacgctgacataaaatcctaattgaagtagcttaatttcaaacatattttggaaatcttctttttttcgatttttaaaaataaaattctgcatttctttataatcggtgagaaacatccgctgttccttggatttatttgcacaaattgtatttaagttcagaactatcatgatttatttgtaattttgtgtaaaattagctatactagttttaaaaatgtttattcaaaacctttattcccagaactattacgtcacttggtaacttgacgtaatagttctttttttataaattatttctctttcaatctatcgctaaaagcgttattacttccaaaaaaaatatattctaaaggtattttgtaaaaatctgctaatcttttcatttgcgcaagtgttaaattgctagagtcattttcccagcttcttaaagttggaacactaacgctaccttttgcagccagttcctgacttagattcaagcgtacccttagatcctttaaagtatgttgcactccaatatcttgatttgccattatatctctccttccaatcattattaatttaatatataccgcttttagcgtttttacaagatactttttgcaaaaagcaaaatttgtttatgcttttagcgatattacatgttattatatagatacttttattggtagaagagaagggggattatatgagtgcaaacatcaatactatttttagtcaaaattttactaatctattaaaaaatcgatttaaaactttagcagatttttcaaaagaaacagatacagcctactctaccgtgtctgattggaaaaatggaaagaagttgccacgtgcgggtggtttacaaatgattgctaattattttgatactgatattccttacttaattactgatcatacaactactaaatctgaagagcctttaactgaaataaaaaataacaattgtttacaatttgaaggtcaacgcatgactccagacgaaattaaatacatgacaacgcaacttcaaatgtttagattatataaaaaaaataatgataaagatcccgaaaataacgataatcctgataaataaaaaagtcgctattcactctaccaaaagttattaagcggctttttgtttgctctatttttctttcacaattgtggattgccttcatcagtcgttttacagcttttaccatctttatttagaaagctagtaaaggcattttataaaatatatactttttttaatacaataattacttgaaaggataattaaatgaaaaatttaagacttaaatatatcagaagtaaaatgggctttacacaaaaagaattagcaaactacttacaagaagcaaaacatttaaaaatatcacgaggaacaattgcaaaatatgaaagtggcgtcaattttccctcaaaaagaactttaaaagctttatctaaagctttagaagtatctgaagactttttagcaggtaatggtttgcaaactgaagatatagaagatacactgcttaatcttttacaaaaaaacttctttatttcatactcatattcaaactcaaataatagtacccataatgctatccatcattatcttgaatatttagaaaaagaaaacgagccttataatttctacaaggacagtaatggtgatttaaacactgtgctagtaaatacaaaatttcctagatacaaagagattgacaatttttggaaaaataattttaaatttctttttgaagatagaaaattcaaagaaacattaattggatctaataaaacgaaactgtcaaattttttgtgtaaatagatctttctcgtaaattgtttttttaacgttttatttattcaaaataggattctaaggtatcctggacttgaccaaagcctttgtgaattcggttgaagtagcggtcattgtagctcattgcttggatgccaataaaagtatcaagcgactgttcagtcgggaactccgctttaggcttagccttgcgcttaatgacgttattaaaggattcgatcatgttggtagagtaaattgaagccctgatctgcttaggataattataaaaaacaagcaggtctggctcgatgtctttcaggtttctaatgacacgattgtagctcttgttccatttggcataaaaagcatgcaatacatcaacagcagccgctttattggcttgctggtgaatctgcttgaattcgttcatgattgcctcgcgatcgtccacgcgtactttagcgcagatgttgcgcataacatggaccaagcagcgttggaaatgagcttgaggataggtctttgccagtgctgctttcatgccgacaacgccatctgaaaggaaaagctctacttgctttaaaccacgagatttcatgttctggagcaacgccgtccagacttcaatgttctcactaggcgcaatgcagtagtcgataacttccttgtgaccattaggcttgatgccaatggcaatatatactgcttctcgttcaaaagtttctcgacgcaacggtatatacgttgtatcaagataaacacaaaagaacttatcgctcagcttacgcttgtgataagcctcaactttaggaatcatttgcttagagatattagacacttgagctggactataatgactgccatacattttttcgatcaaattagctatttctctagtggttacacctttagaataaagctttataaccatatcttctaagagatcagtatgttgtttatagtctggcagagtgtgttgatgaaacataccattgcgatctcgtggcacttgtacctcaattgatccaaactgggtatcaattttacggaaatacgcaccatttctagaattaccagtattccagccatttctagcatagggatcatatcctaaaaaggcagtcagttcagattctaacatgtcattaacagcttgttggatttcatgacgaagcaaatcattaattttatcttgattgaatagagcttgagttatatttttggtaaaatcattcatgaaggagttcttctttctgtatgttttttttgttcaaaccaatcatacgagaaaggaactcctttttctaatgttttaggaaattaaattaaggaataattcatccttacacaaactattttacggtctcattttacggtctcaaaaaacagctattatcatataaatatataatttatgaatatttattaaggaaaaattattaaacatgatcaaataacaaattaaggcacaaaaaaagattaggtttatcacctaatctttctttggatcaattataaatagttcttctacttttgacgtttctttctgttaacacctaagcctaataagctacctacagtggcaattgctaagcctaaaatacctacttgttcagtcttagaaccagtttgtggtaaagtcttcttactttcaactttagaactagttacagttgctgccttggctacattagtattaccagtattagcttccttagataatgtatctctattgctttctacaacaggatcaacatagacagttactttaacatctactgatgtaccatctgggaaggttacagttactataccagtcttctcacctacagagttaacatctggaacttctttccatgtgtacttagtgccatctggcatctcatctttattctttatggctgttgatggatttggtactacacctggagtagtgtgaacatcttgtggttctggagttgggttatcaactacaacatgaacttcaaccttatctttcgaaccgtctgggtatgttactactactgttgctgttgtagtacccggcttacttacatccggagtcttctcccatgtgtacttagtgccatctggcatctcatctttattctttatggctgttgatggatttggtactacacctggagtagtgtgaacatcttgtggttctggagttgggttatcaactacaacatgaacttcaaccttatctttcgaaccgtctgggtatgttactactactgttgctgttgtagtacccggcttacttacatccggagtcttctcccatgtgtacttagtgccatctggtaagtcgcccttattcttgatgccatctgctggatctggtactgtatctttcttaacagtaatgttttgaccttctggcttattagcttggtaagtaatagttactaccatattagctgaatcaggagttacaactactgcgtctacattaccatcaactttggctacataacccttgatttgttcaacattaacagcacgtaatccctgtttagctggagtccatggattcatagttgtcttgccagttactggatcagtataaccggcattactatttttatcttcacgagtaaacttagcagtttgtacacttgtactaattttaccagttattggatcaactacattgatagtacgagttacttcacggtacatatctttattagatggatcaaacggtactggaatatctgcattcttagtgtagctaattgttacgctagcagcttcagtttctgcagttactgtttttgcttctaccttagcttgtgatggagtgtaacctgttactgatggtgctgtatattcttcccagctaccagtcttagcattcaaatcacttgctacatgccagtcagtattgtatttaatctcgcctgttactggatccttgtagccactattaccatctttatcttcattagtgaagtgaacagtttgagtaatagtttgtggttctttacctggttccttaacgatgattgtacgagttacatatctgttaatggcatcgtttacgccatctttacctggtttgtatggtaccggagtactattttgctttttgtaagttactgtgatgttttgaccattttgtggtgtgccatttgtttcagcaactttggcagcatcaacttgagtagcctttgcaccattgatatatgcatcatagcctgtgatttggtcaacactgtattctgggaattcagcagtttgaccatcagccagtttccattcattccagataatttccccagcatctgtaccatcagcattaatcttgtggtatccatcacgtacatagtgaaccttttgtgttactgagttaattggtgaatgaccagttccagttacatcatattcaattgtacgttctacataaaggttagtatcgtcattaactttactacctgaagttggaacatgtgatccagtcttaaatgttacttgaacatttaacttagtaccgttatcaaaagtaaattcaacaatcccagtcatgttagaagcagcaaatttgccatctttacctggcataccattttcagcccacttaataccagttgggttaccattgacaaatgtcttacctgagatactgttagttgctaagtaatgcttaataccagcttcatcagttgatacttcactgccatagtttactggaatattaattttaccagttgcaccaaggaagttgtagtaaacattagcccaagcattgtaaccagcaggtgataaacctagtttttgcaatacattagtatcactaatactaaagtcgtaacgatacttagagttacctgctaaacctgatggatcattggcatcagtttgctcttcagagttaacagcaccattttcaagttggtaaagtgtgtctgcagaaccattgctaaagttatcaacaccagtgttaacttcataacccttctgccagttaaagctaattgcactagcatcaaagctgtccgtagcatcagcttcgtttacatacttagtaccatcagcacttagcttgtaaatcacatgcttgttatagtcgctaacgatgttacctttcttgttccaatcagagtaatatgtgattgtttggaaggcactgtctttagcacttaatttatggctatcagtagtcttgtgaacagtagtaaggttgccattgaagaccaccatactttgatcaccgtagtaaacaacgtcaccactacctggatcaaccttgttaccagtgatacttacaggaacttttacttcagcataagtaccgtcactataagttactttaactggaacttcaaatgaacctaatgttgcgtttttacctacactagcagttaccttaccagtatcatgatttacatcgatagttacacccgctggagcctcaaagtcacctttttcgtaaccagtgattgcaccttctggcatatctgcagcagcctttggatctactgcaccagttgctggtgtgtcgccgctaggtttttcaacatttaacttgtcgtagctaactggatacttctcagctaagttactcttttcggtaacagttactggtacagttaattggtcagtgctgctatctgggtatgttactgttacagaaatatcatgtgaacctacactagtatcatcagttggtgaaacagttactttaccagtatcaggatctactttaatccaatctggagtattttcacctgcagtgtacttagtacccgctggagcatcagcagccttatcgttttcatccttaaagcttggatctacgctatcagacttaccttgctcaacggaaacaccaggataagatggtgttaattcttcactatacttcttttcagtaaccttaagtggaatcttaacaaagtcaactgaaccatcagcataagttaccttagcccaagcaaaaccatcagtagtctttaaattacctgttggtttttgtggttctggataaggaactcgggcccttggatccttgctgtcagtcggctggatcatgatcttgttccattcatccttatcagttgcagaattgtaccaagtaacatgcttaacaatatccttgaagtcagtgattggttgttcatcaggaccaattaaatctttaagtcccttattagcatcaagatcacttaatgtttgacgagtagttccatcaatcgtttgcacttctgggtgatacttatcaaaatcatcaatcttaacgtcaggactatcattcaacttgctacccatagccattctttgtggacgccaaaagttaaagttgtttaagaagctgttcaagtgcagtgcctgttgtacttcagttggcattgtaccgttttcgtatttatcagcgccttggttcttagacattaagacagtagcattagagttataaagtgtatcaacacctttctgcgcaacgacagtattaggatgttgatctttacccataaattgaccagagttattaccccattggttcgcagatatcaggtatcttacataccaaacatcattaggagtagtagtcttattaccttgatcccattgagcaactggtgttggtccattaacagtagtactgttgtagacaccttccattctaatcaatgtaccacgaatatcaccagtacgttgtaagttgacatatgctggggtaagaaattccaataaatctgtaccactcgtaccccacagagtaaccaaaccattcaatggtgtgctaagttcagtaccatattgaaatgtacctgcactgtcttgtaaatcgagagtagcaccggcaccaacagaaaatttcaacgtggtattactacttacaccaccgtcacccattgaaattaatggtacaagtgtctttttaggagtatcacgtataatagtcaaactaccattgttaattaagctgacagtttgcttagataatggactggcaacactacttattggaccaacacctaatgaaattggagcatagtgggtaccattataattagttactgaattagaagtaccattttcaacaccatcagcctgatttgtttgcttggtatggatagttacattaccctttttaccaatttcaagatcatgtgaccaaattgcagttgagtgaccagctgccatgttggcattcaaagtaccattaataacagtaacgccatagattggctgaccagctgttagttgacgcccagcataaataccacgtaagtcgtctgatttagcattaatagtaacagttgcaccttcattaattaaagttgaaggattttcactattactagcatcttcagttgaacgaattacccagttgttaggattaatagaacgtccagttactttaccattaacattaaaagtagtattaccagagtcaaattttacagtcttaccagttactagattgtaaccaattgacatattattaagcataatgttgttatcaccggcaaagtgaactggtaagttttcaccatacttgtcaactaatgggcgatcattcaatttagcagtgacaccctcaaacattaatttactattttcaatattagtcttgctgctatagaatgaaattggtgaatagccatacttactaccctcaatcgtcatatcctttaaagtaatgttccaagggccagcagcattgttgtagttctcgtcttgtaaagcaatactgtaaccggcaaagttgatagtgtgaccattaccattaattgttaagtcacgagctgaacctttagaaggcagataaaggtagtgcttgtttatatcacttataccagaagtagtaaggccgttaactttaccggtaatagtaatatcattggtaatattaatagttccaatgctactatcattcatggcattaactaagctttggaaatcactggcatcttctgattgagtagcttgaggtgctgctctaaaagcacgtagtgctgcaaaaacttgtacttttgattctgctgcattcttagttacagcttcattagattgagactgtgcttttgatacatttaatacattttcattattaacagtcttaggttgtactgcgtctttattttctgcttcaattttatttgcagaggcacctttttgtactacagaactaacagccgttttttctgcttttggcatttcaatagtcttattttctgttgtctcttgactcttatctttattgaaagtgtcaactactacagatttatcagctacatctgcagcttgaactttgtgacttccagccgtttgcgttgttaaagctccgcgctgtatgcctaaatgactttcatgtcgcttctttaagctatcatgggctgccgcttttatgctcagttattgcatttatttctgagcctgcaaactcgctgcttagccttccagttcattgtttttgatgcaagtcagcacacgcaaaattccttcggcaccatcttctgaccagtattttccttgccctttgacgcgataagtatatttacggtgattggctctcacagcagccaattgccttaattactgacaaatgacgcatcttaaacggcttaatatccacccagcgacgatgaagatagctgcgcagccgctttaggttttcatgattttctggcgtattcagctcatcaaccagattgctttcaatcgtgtctaaaatcacatcagttaagtgacggtcctatttaaactcaactgcactgatcaatttgctttgcatagccggcagaactctctttctgcgcgtcttgctcacattaataatatcttcacagacttgatagcctttcttctcggcaaaatcttgcaattcctgcatttggttagctaaatcatgtttttgcttataagtagaaacgcgtccgtaaagcaaggttagtcttggtgagcgtccattttttaataagaagacagaatcatcgtcgaaggtgtattgaccggatggcaaacgtcttgccttcaagatgcctttttcgcgatacctttttaaagttgaacgactgatttgaagcaaattcatcactttaccagctttcatttaatcacctccatgcttaatattgtataatttgcagtcatatgaatcacgcaaaatgatcccttatgactgaattaacctaattatttctaactatatataaagcgatcatctgcatcatcaatcttaaatcccatttctgcatatttatatattactttttgtaaaaaatatttttcaaatatcttattcaaaaaatatctaacatattttttgaataagttttaaccttaataattgaactaattctaaagtaagcgtatgatttatttcacactgatgtacttaaggagagtataacatgacagataaaaacattgctttagctcgctttataacatcttttggtagtatgaacaactacaaaagctccgtgcttcaaactaaacgagttctagataataaaaaaggggctaaactacctaaaaatgatattgcaattttaaatgatgctcttgatggcattgcagcaattaaaaaaacggatttaatagcgctggtatcatagcagtaaatgaatccttcactcattcagaagaggaagatccagcatggcctggtcacttaagaaatgcactatctgatccaaatgatgcaattgcaataatcacagatccaaatggcacctcaaaaggagcctatatagcactagctttggttactatatcagaacttgatgatattgtcaaccaatttaatgaataaaataaaactataagagatggttggaaagtttttgcgaaattatcaaagttacaaccttttcaggatggtaataaaagaacagctctcatcgcagcaaatgctgctatgaatacttgggaacaagaaaactacttagttttaccttttaataatattgatcatgctcaatttatggtagatttgatgcgtttctatgctgcaaaaaatgatattgaggaagataaagcattagatagaatgatgacagttttaccatcagaaaaagaagttagtttacactttccattaacccaagaagaaaaggaaaatccaaaccaacttaaaacaaaacgaataaagagtttttattcaaaaagacgccaatctttagaaagataattaaaatgactcaagaatttaatttcttgagtcatttttctatccaaaatcattattaattcttagactagtagtatattttactttctaagtagcttagattttcatgagcattattactatttattatcgaagttttctattgcttttttcttttgtaataatcctaaagttttattatagtctgctactaattgcatatctcctccagcatttctaacctgttctaatatctcagcaataattttctctaattttggtatatcagccttcaatacttccttaccaagttcacaatcataaaaatctctaactgttaattcacctctacttggctgccatacatcaatattgagcttatcatcttcatttttttcttgctctttttcttctgggtgaacagcaaaatattccttctccgcagtaccgtgtttttgtttcaaaaatttatcaatcgctttaaacttatcttttctcgttaaacatatggccgaatcaatatttactagtccttcagataaaatttcttcaggagttgaataagtagtatttttttaggattttctggctcaaaagtaaaagtataactaacaactactctatgccccttagcagtgccatagttttttgtataatttaaatttgtaaaatatggggaaatttctattagagcatcttttaaaattttccttctcttgttttttctggtatttctaattgctcccacaaaccaattctagttttgctattagttttttcaatatgttttctaaatgtgatagatcccacagttcggagctgctttagaagacgaagcaaagtttgtgatccaacagaagataaatcaactatttctctagctggatagcgaacaaaatctccagtttttgggttaattaataaaatatttatcatgaagtcattgtaaacaaactcaaaatattttttgttcgtattattaattattcctttaaacattggaaaacttgctgttatcccatcggcttttatctcacgccatttttccaatttatttttcatatcttcgatatatgtgccgatactagcattattattatcgtatccaatagcatgatcaatttcactataagtaacgcgtgtaacaagatcagttgggaacttcacttcactagcaattcttgtaagagtttttttatctaaatcatttttatccaaatttaacgctttaactttcttttggatttgctctttttgatatgcagccaactgatcagcagttttacttaaaatcactgttaatattttagtatgagtggcgttcagtccagtccatataactctatttagttgagatctaaaacgcattagtagagtagtagaagcaaatttttttgctttacatctaccggtaagtcgctattatgtgcataatccacgttaaacaaatcaagttgttctgagttaggacaatcttctgtctgctctttttcttctgatttatcaaacaatttacctaaaatatcatcaaaattctcggtcataactagtacattccctgaaaagaataagtttatatttcttagtataacttattctccctacccaaggaaccattccccactatttagcacctttgataaacgattcttattaattacatttgatcccactactgggactctttgctaatacacaaataaaacatagatatctatatatgtttttctccactatttgtaccctttgacttttctatatcgcaatatatgagaccgtaaaatagtttgtgtaaggatgaattattccttaatttaatttcctaaaacattagaaaaaggagttcctttctcgtatgattggtttgaacaaaaaaaacatacagaaagaagaactccttcatgaatgattttaccaaaaatataactcaagctctattcaatcaagataaaattaatgatttgcttcgtcatgaaatccaacaagctgttaatgacatgttagaatctgaactgactgcctttttaggatatgatccctatgctagaaatggctggaatactggtaattctagaaatggtgcgtatttccgtaaaattgatacccagtttggatcaattgaggtacaagtgccacgagatcgcaatggtatgtttcatcaacacactctgccagactataaacaacatactgatctcttagaagatatggttataaagctttattctaaaggtgtaaccactagagaaatagctaatttgatcgaaaaaatgtatggcagtcattatagtccagctcaagtgtctaatatctctaagcaaatgattcctaaagttgaggcttatcacaagcgtaagctgagcgataagttcttttgtgtttatcttgatacaacgtatataccgttgcgtcgagaaacttttgaacgagaagcagtatatattgccattggcatcaagcctaatggtcacaaggaagttatcgactactgcattgcgcctagtgagaacattgaagtctggacggcgttgctccagaacatgaaatctcgtggtttaaagcaagtagagcttttcctttcagatggcgttgtcggcatgaaagcagcactggcaaagacctatcctcaagctcatttccaacgctgcttggtccatgttatgcgcaacatctgcgctaaagtacgcgtggacgatcgcgaggcaatcatgaacgaattcaagcagattcaccagcaagccaataaagcggctgctgttgatgtattgcatgctttttatgccaaatggaacaagagctacaatcgtgtcattagaaacctgaaagacatcgagccagacctgcttgttttttataattatcctaagcagatcagggcttcaatttactctaccaacatgatcgaatcctttaataacgtcattaagcgcaaggctaagcctaaagcggagttcccgactgaacagtcgcttgatacttttattggcatccaagcaatgagctacaatgaccgctacttcaaccgaattcacaaaggctttggtcaagtccaggataccttagaatcctattttgaataaataaaacgttaaaaaaacaatttacgagaaagatctatttacacaaaaaatttgacagtttcctaaaatttttactattcattaatttttccactacttagcacccttgagcaattatccacagaaatcatacgatttttgccttttttagctctattttctatttctgtggaccattacttggcacctttaactccactatttggtacctttaactccactatttggtacctttgactccactacttagtaccttgggctccactatttggtacctttggaatttgctatcgcttgagtctctaaggctaatagaatacccttaatactctattaattccttttaatgtcttataaagtatctattaaattaaataaaaaagacgaaatgaaaatctcgtcagaagtagtaataatcttatcaattattttgagtaagactaagtagttttttaaagtaatcatttataaaagttgataaatgtttgtagccatttttctttgctaacttttcaatttctgatttaacatcactatcaattgttatagaaattgattctttttccacgtttttcttagatacaaggtttaacagatcagagtaattttgagtgttctgttcattttggttatttttactattgttattagaatttgattgctttaatgctttagcaatattgtcgtcaggtttaaaagccatatatatttatcctttcttaactttataatttgttttctatgtcttcaaatgttttaaaaacttcgccaaaaaactttctttgctgtattgccaatttatggtcttttgccatttcactcaaagaaattttatttaattcagatttattaaataactctttataaggaatataagcaatacaactattatcacctgatttttttcatcttttaagctatttaaaagatcacgtgaacttgttgtattatgctttaacatgttagctaagaaataaagattggcggttacatacgatttatgagatgtaaaatcaattgcttcttcagataattcttttagtcgttctttcaagttatatttagctttataaccatattcgcttggtgtaatcgggcttaatatatcgtcgctaacgataatagcattcttggtagctgtactgaaatctgggtgacaatcaatcagaatgtaatcatatttatctatatgtaacttttgatagttatcatatagccacaaatatagcatcatgtttttattagttttattttcgattaatgtctctatatcatcaaggtgcatatcaccagcaattaaatcgatattttccccaacattatgaattactacttcatctttaggatttaatatattgcctacactgcccttttgatcataaacattataggtttgactaagattacattgatgatctaggtcaataaaaagaaccttctttttattatcggctagccatgatccaaagttatatgcaatggtagtttttcctactccgcctttaattgctgagaatgtaattatttttgtcataatattatattagctccttaaacttagttctaaatatttatttcagtattattataaatcgcattagtcgcattatcaatatactatttaaatattattaataataatatcattacatgatatttttatatataaatatatattctacgatcatatttcaataataaaaaaagaacacaagtaaaaattgtgttcctcttatgaaataaatatttagtagctgagctacagtactgattgtaaaggataatatttgtaattacaacataaaatcttttgttgatagaatacgatgattgatagctttttctttgctgaataaatctttaatcttctgctgataagcggtatcaaaatatttggtaaattttgatagcttattggggctaatttccaatcggttttttgataataaattattttggttataagctttatcaattaatctgttgtacatagtagcccaaggttgtaaatttgtaatgtttgttgcttcttttaatgttagaaaagcttgaattcccaaagtgctaagactaccaaaataatacatatttctaatttcgtttacgttatctggaaggaaaaaattatattttgaatcaaatgtttctataaggtcaatagcatctacagccattaaggaatcaacattaagattgttcgctatttttttcttatctttaagctgcttttctatcttccatataagttgctttgattcaaaaaatatgattgtatcccctgcttttctgttaatgggaattgccacatggggaaaatacgtttctccaaatacgtaatttgatagcacattatcattcatttactgtagaatcctttcttagttaaatgaagcaattaaagatggatattgatttgtaattagttcatttacacaatcaaccatgttaaaaggaatcgcacaaatttccattagatcatataagtttgaaaaatatatgctattcttgcttaaccctttaagaattaatttggtagcagttctatctgcatagtattctattttaatatctagaattgcactatcacagtcacaacgttcttgatctccatttaaatagtgacctagttcatgtgcaaattgaaaagcttgttttctttctcctacgtctgtgtaatttaaaaagatatttctgtcttcgggaacaacacatgtaggtatgggacttcctggttcttctagattaacatctaatttatattcttttgctatttcaaataaaaagccgaatagtatatccttaatatccatttttaatcactcttttatcacatcttgaacatatgttctaattaaaaggatagcatatttgtgttcgctttgacaacaataatgttattaaaactattcaaataaatttcttagatttttggattataataaatatagaaataaaaatgaggagaaaaaaatggctaaaggaagaaaagcaatatcattggctgctcgtatacgtagagagcgcattaaggaaaatttaaatgaacttttgaaaaaaagaggcatgaccccgaaagaattagcagaaaaaacaggtatagcatatacaaccataaataactatcgacgtgtgtacgcacaaccttctttacctagtaaaaaaaatctgcttgctatggctaaagctttaaattgtgaaccggatgaaattgatccatcctatctacaatttgtagtgactaatgataagttagacaataaagagaatttacaaattttctcttcaaatttagaagctttaatcagccgtgaaggattaacttataaggaattttgtgaaaacctaggcatttcatatcgtgcattatggggttgggctactggtgagattaaaccaagtgaagaaagtctagagatactatctaaacactttagaattccaattagcgatctcctgaatactagtattgatacagaagaagcaattaagcgaccttttgaaatacttcaacatattccaagtaatctttcaaaagaagataaggatcaaatcatggatttcattgaatttataaaatttaaaaataaaaggaaagctagaaatggatactaacaagctaacagaattaagaaaagagattgataaataccgtccattagattctgatcagataagagcacttaacaaggatattcgagtggaacatatttggtcatcaaacgccattgagggaagtaaaattgataagtttgagacagaagcaataattaataagggaataacaattcatggtgaatcgataggagatgtattatcaactattgatttaaatgaagcgtacgattatatgctagatttagctagtcataagcaacctttatctcaaactactattcgtgatttaaatagattggccttagcaaaaactcatccagagtggggtggtgagtatagagtgttagaagtacacccagctaagactgattttaatccgtatactgaaccgtttgatattagaccagaaatggataatttaattgagtggtctagaaaagcccagaaagaaatgcacccagttaaatatgcagcagatctacactataaatttgtaacaatccacccttttagagatggaaatggacggacagcacgtttgctgatgagtttagcgttgacggaaaatgggtatcctgtagttaatatcatgcctgataaggaatcaagagaagaatatatggaaactttacttgattctcagaaaagacatgatccaactgcttttgaagacttggttggaaagtacactgaaaggactttaaaaaaacgaattcaaatcttgcaacttaatgaaaagaataaagaagaagctagagaagaaactaggttctcaaaagagcaattgaacgaattagccaaacgtcatcgaattaagagtaagcttaggaaaagaaattaacatatttatcgtagcttaatgagagataaatattattatgaataatataattgcattgcttttatattgcagtaatattattaaaacaactttttacaagctggttatatattatctaagtcgattcaactagcatcacacgtattgtattgtcgatataatataatgatattatttaaatattatttatataatattgatatatagaatataatattataataaaagcatgaatataattctttaatgctatttgtgcaaataaaaagcctaaaaagcttgatactatgcagctttttaggctttattatgttataatttaaatagtgcaggtcagaaatttcgcgaacctaattcataacaaagaggtgtcctttacgtaaactttttgtcaaagtgctggttggcaacgcattggcctgcgttgggatagtagcactaagctgatttaccaacctgactattgaagtaattacctcaatcttcaaaagtaattatagcatgaattagctatctgataaagcagtcaagattttcttgactgctttttgttgctactaaaagtagagtaatatttctaactaggcttcttgtagatcatataatgcttcagtagcaacctttgaaacattaattttatttttctttgcccaatcatttaaatcagcaggaatagagatgtttcttctaacggttttaccatatttattgagccatctagtcatgtttactgatacccaagaggtttgttgtcctttgtctaaagtccattctctgggatcttgaacttcaggacgctctggatcatttgctaacatcgttgctaatgcatctttagcattctctaaagcttcagggatagtttcaccatctgtgaccattccttgaatattaggagatgtaaccacatagtaatgccctgattcatcgttatattcagttaagattactggataagtagctatatcttgtttcatgaatacttagatatgccaaagcaagcgggcatttcctaatcccgtttgcttaagccggcttcttttaaaatttggttttcagtgccttttcttaattctttcgcatgcattggaatctgtttcaggattataaaaagatctatgtccaccactcttaggttcttcaacaaagccatgttttaaaagaaaccttaccattttggctggcttccaaggcatgtctttcctcctctcataatttataaatatattatacacaatatttttgtgtattagcaataaaactaataaaaaatcatctttttgatgaagtaagatgatttaaatggtattacaatactgccaaaaatattcttttaatattaaggcatgtttaaaagtaaagaaaaagcctagaagatgcggtacattgcagctttctaggctttattctagtgcaggtcagaaatttcgcaaacctaattcataacaaagaggtatcctttacggaaactttttgtaagtgtgccgattggcaacacatttgcctgcgttgggatagtagcactaagctaatttaccaacctgactattgaatgtaattacgttcattctcagaagtaattatagcatgaattagctatctaataaagcagtcaagatttgttttggctgctttttctataatgctaaaattattcgttaccgaataattttgaatattcattccagaatttacaacgagtactatacatttcatagatttgatttgaaagatttgatagctcccttttgttgctaatatcaattctaatgtcacgccatctatcaccaatatttgggagagttgtatccattaaaatcaaattgtttaactgctttcttacaccttgactatttaagagtcctaataagttaaacggcgtgatgccaagatcattgttaagtacccttaatactaggatttctcttgttaaaatggaatgtagatcttttttataaagaatacccacgtctccaattctataactacctcttcttacaaaaacgatatctttttctttaagagtcttttccggagagtaaagtctctcatattctttatcgggaatatcatctaatctattatgggcaatttctaaattaacaatatcttttactctaatatatgggttagttcctaaaccttttaagtaactcaatggtgatccatgaccatcaaaactcttaataatattattgtcgcagagctcacctaaggtaatttgtttggaactactattaatctcaaaataaggtcgtgctacaaggatatctttttcttttatttttgaaaaaggtattttttttaatttgaagaagaattatttctcaaagaattaacgatgcttggaatcttatcggcaatttcatcagtaaaagaaaaggtatgaggatcaaacttatacttagcttttccggtatgatcatgtcctatttcgtctatttttattcctgtaacaaactcttgttgcctttctccttttcgcaaaaatataatatctgttttagcattattatagggtctaaaggtatcatgaggcagatcaattatgtgggtaatattatttttatagaaaagtttttctctaacttggcgtgcttttggagcatgaaagactgtttctggaagaataacgccaagtattcctcctttttctaaatatcttaaagacatttctataaaagccaattcaattttattgccaaattcaaaattctctttagtttctgtagataatttaatatctttgccgaatggtggattagtcaaaattatattgaattttttatcttttatttttgcttgcgtggcaattttccaatttttttcttttaaggagtcttctacaaatatgcctgctcttccatcgcctaaaacagccataaatgctttggaaatttttgctaaaaacgagtctttttcaattccaaataaattgttagtggcatattgctgctctttatctttttttgcatcgtcgcgcattttagtttgctgtatttgattccagacatggaacatgctcgtggttagaaagccagctgtaccgctagctggatcaaaaactgtagtagattcagtcgggttagcaatttctaccattaagcgagcaacattttcgggcgtaaaaaattgtccctgtgatcctttagtagcataggagatgatactttcaaatgcctccgaaataacattacggttagaattcattaaagaataatgctgcaactgggcaacgacttttattaagacatcatcgtccaatgttatttcatcgtctttcgtaaaaacatcattccagcgattttttgcttcattatagagttgcttaattgtttctgctgtctttttgggattatcttcaactactctaaattttacgtaagtgtcttctgcatatttttcatcatatagcttagtaataattatcatagataactgttctaaaatgatctcatcgcgcgttgtaccagttgaattagcggctaaaaagccacgtaaatttttaaatataacttttaaattgctcgtgggctttaaatcggaatatttaatttgttcattaatagaattaaatccatatttaggaacatctgaaatttcttcaaatttaggggtgccgtctttaaagtactttttgaaataagcaattgtttgaccattttcattgtggccgttataccaaatgccataagcaacatcacgttcaaaagtcatataatctttgagttgatcttttcctaaattatagttatctttcttagtttcaataaaaatttttggctttttattttttaaatctttctttccttcaaatacggcgacgtcaactggaactgatcgtttaacgtctgatggacttttctttacgccaaattcttttaccattaatgatagaggataattataatcttcatgaagaatcttaatgataccttgtctattaatttcttctggggttttaaaaatttgttttccagttataagatccttgatatattctttatgcgccaattaagccaccgcctttctgattttggcggtgaaataaacaattcttaaaggtctcaaaaataacaagttgttgacattatgactgcgccctacataatcagatagatagatagataccatactttttattctttcctcaaattgacttaatttaaaatatacatttcaatatattgatagactgcctattttgtcaatgatacattaaaaaatctatggtatattacatatattatttaaataatatcgattttgttaataatggctaacatgctcttgctctttacagttaacagttaaaggtataatttaccgatacctaaagttactagcattttagatcattttcctttttgtaatgttattttagtagtatttgattattttgttcattcgattaaataggcttgcaataatgcttgcctattatttattatagcattcttacgcttttggaatagcatcaagaaaatattataagaaaaaagccagcttatgctgacttctaaattaatgtttatataaatcaaatttaggatcaacagcgagaatataaaaaatattatcacttatttttccaattacgcgaccttttttgcttaatctaaagacccaataatcatcatcacattcatcgtatctgccagaagttttaaattcttgcttaattctaagttttacttggtcttctggcattaactctaatccttgttcttttgaacgattcaaaataagtattttatcttcctcagataaagtagctattttttctaaaagctttaatcttattttgttatttacatttttattattcttctttaaattatactgcgtcgtatttgttaaaaaagaaaagttaaaagcaagtctagaggtatgatgcctaatctcttgtcttttagggaaattatgattagaaaaattttggctacttgttatcttcattaattacaaaaacatccttgaaatagctctttattttgtcgtcactaataacctcactctgctttgtctctttccaaggtttttcgctatgagtttgacgcattaaatcataggcggaactatgaccatatatatcataaatactatttaaaatgtcagcagtttgactatcactctgtaattcacgatagtcatttaaagactgattatcaacataacctacaatgccacgttgatgaatatatttattatgaacagattcaacagcagggccatatctccatgcaacaatgtcatctttgaacattctatgaccagttacaactaaacttgcggcttgaatataatacagtaatttcatagccttcatttgcgttaattcttctgcatttggattggcttgtaaatcagcattatttctaactcgtagccaattgactattttaaaaacgtcatacataatgcttcctccattaaaatttcttatcttggcttaacattttattacttttaatatacacaaatattaaatatttgtgtattctgtcctatcacatcctatcataagctttcatttgtttatatatcggttgatgaaaaattataaagatttaatcttcatgtccatgctaagctttataactataaagatactatttgcttatgacaaaaaatgataagatcatattattatcacagcatataaataatattataatcatgtttaaatctgattgatttttttaaaagcatactattgcaataatatagttatattatctttatctagatattaatattatacaaaaggtataaggataggatttttgtacaaagaaaaagcctaaaaagctttatactatgcagctttttaggctttattctgttataggtatcctttatggaaacttttggtaagtgtgctaaattagctatttgataaagcagtccatctaggctgttttttgatgctattcaacgtagttagaattataatactttttatattacgctaagcaagataattgtaatagtttagcattattttaataatatcaaagcaatataacatatagaataaaatatatatttattagaataaaatatatatttattgattaacatcaaaataatttaaaggtttaccaaatttgtcaaggcgtggagtaatagatatgctcggaccataggatagaacaatatattctacgccagtctcttcatcgtaagcaacattatagtttatagtcgggttgtgcagatcatttaaccttttcatgtatcaatgcaatcctttccttaatatttttttctttttaagtcgtcatgattaccggtatcaatcaagatcaagatcaattctccagtatttttatcaaaagtatattctagaagccagtcattttgaatatgtagttcataatagttagttaacttatgtgctttatgtttttttaataattttttatctctagttactattgcagttacgcattcgtctaataattgaaggttatagtgcttcttttttaatttttttagggattttttgtataaaggcgtaaatttaattctcatccagtgaatagagatcctttctaaaatcttctaaagaatcatattcacctgcatattcatgatttttaacttgttctaatgctttatccaattcacttctaccaacacttggagtaaaaggtaattttccgtgttgatttatatatataaaatacatcttagtagctgtagtcatgtctaatcccattttttccaaattagactttgtttcctcttttaacttgttatcaatacctaaagttaccggcattttacatcatcctcctttatgttttacgtacattatatattaaatatactaataaagcaatataatatgataaaatcatatgtatgatataaagtctacagagcgtaatttttttgcattaagtcagatcacaataatattttaatattatttattaagttcaaatatattgtcacaaaattacggcaatcgcattcaaaataatattattatattgtaactatcatgctatagtctgattataagataaagaaaaagcctaaaaagcttgatactatgcagctttctaggctttattctgttataatttaaatagtgcaggtcagaaatttcgcgaacctaattcataacaaagaggtgtcctttacggaaactttttgtaagtgtgctggttggcaacgcattggcctgctggcctgcgttgggatagtagcactaagctgatttaccaacctgactattgaatataatcatttcaatgttcacaagtaattatagcatgaattagctatctgataaagcagtcaagattttcttgactgctttttgttagatttttatataaatgcttgaatttaatttttatcagatgaataaagatcttttctaaaatcttctaaaaaacagcaaagagttttcttgactatttttatactattaaagtagcatagttataatactactacacaaataatgatattatataaataatattaaaatatcatttttacacagctgtaaataaagaaagaactgagaaaccttatataatacagcttgctttattttgttataatttcaatgtaagtaaagttgatttgactaataatggagattgaatgaaaaatgttatttgctattatcgctcttatagtttttttactatttgcataattccggtttcgatacttgctattgatcaatttcttgaaaagaatggaccaacaattgtttattttactcatcatacttattaccttttacaaattatattcatatttgcgattacctgtgtaataacgtatttatatataaaatgggcaaacaagaattatattaaagaaagaaaagaagaagttaatggatctgctaatgctgcaaacaataaaatttggacgtttgtaaaacttgtatataaaatgatacagggaataatcatttggtttatatgtatggtgggaatatttgcatatcaagttcaatattctgcctgggcagtgagattgcagaaggtatctaatatattcttagttataatgttaatttcgtatttgtgttggtttatttatcttatagactttgaaataaaaattaaaggagatagatccaaattttcgtgtttaagaaaatttagattaaaagttcaaagacgtataaggtatactgggttaaagatactctattatttcagataatcgagtgtgatataaatctactattattaagacagtcaagaaatttcttggctgtttttttttgatgctgttaaaagtaatcagctttttagtactaattttatgctatgttaaactgcataattatatttttaaaatattatcatattagagaccgtaaaatagtttgtgtaaggaataattcatccttacacaaactattttacggtctcaattttttaaggagagatattaaattgttttataaggataacgatgtttacaaacaatgtaaacaagtaattaatgttaattcggatacgtataaaaattatagaaaagatgttaatacaaaattgaatgaaattctagctgcgtttacttggactgtaatttgtggttttccattttttattgaatttggccaaaccacaattccaattagcgatcaagttttcgatattactgtaataattacaggacttgttttctttatatggtataaatacagccataagagtttctttgcaaaagaaccagccttcaaaaaaatggcactcgtttgtaatgtagacaaatatcattttttatatcaaaaagccactcatcaattaaaccaaaataaagatgcagttaggaaaacttttaagttatcaaaatatatatttatgatttttgtcataaattcaatagaagatgatattaagggaatatttatcagtcacctttctaacttgaaactttggtcaatctttatctggataattttaacattactctttacactgctacacttttcgcatataattggaaaaattattactatattcatcaacataaatgctaaaacaaacagcattatagatacttgtataaaacatggcatgtttgttaaaaattacactcttttgtattcaaccataaaagttctcgaagagaatgacttaaaaaagtaaattaaaatgctgatactgtcgctatatcaaagtaacgcaatgtatcagcatttttttaagctccaatgtcaaatgttgattttggctttagcaaatttactatctaaattcactgaggaagacagcgagcaccttatctaactttccttgatctttaatatgtcctactatctcccctcttcttgcttcaaaatcgtattctggaatttgtgttaaaagtaaatcaccatttatgcctgattcaaaatctataatacgttctcgaaatggactttcttttacttttgatgatatagccattgcatgtaccaatccagttttatagttgaatacctctttacttaatacaagataaggtcttctgtcattttgattttctggatcatgccctccgatttcatgaccagcatgtggctcagcgtccataaatacaaaatcaccttgcttgggatatgctttcacttttattcctcaattctttctctaccttttggtgtttgttctaatggatcatatcccaaatcctcgatttgcatcttcttttcttgagcggacatgactggtgcttcgtcccaaaaatttcttctttctttttttatctcgagatttccatctggctttagaattaaaactacattgtcaccttttcttaaaccggcacttgctggaatagtcacagaattagcattaccagtctgtcttacagtatatgttcctaaaacttgatttttcatattattcactcctatcatgcttttgtaagtacaagtatacactgaaaagaatgtgaatacaagtacttactagcagctactatagtaaaacattaaagtatcttagtattacacccattaagtaaaaaaagtttgcgtagcattagggtgatgtgtagtgacccacaaaaattggacaagtagccagcgttatctttcaaaattttttatcttggactggatgtatataatctgttttatttttaatatcttttcttagaaattgctttttattttcgttcaaactataaagaaatagtaaattatatatcagctttaataagtagttaagataagaacttataaaaaatttttttaaaattaaatgtaaataattgtggtagcttatatatctactacaacaaataatttactacaataaaatgaaagaataaaaaaacaaactttaatatattaaggtttgtcaatgcagtaaattatttattgtgagaccgtaaaatagtttgtgtaaggatgaattattccttaatttaatttcctaaaacattagaaaaaggagttcctttctcgtatgattggtttgaacaaaaaaaacatacagaaagaagaactccttcatgaatgattttaccaaaaatataactcaagctctattcaatcaagataaaattaatgatttgcttcgtcatgaaatccaacaagctgttaatgacatgttagaatctgaactgactgcctttttaggatatgatccctatgctagaaatggctggaatactggtaattctagaaatggtgcgtatttccgtaaaattgatacccagtttggatcaattgaggtacaagtgccacgagatcgcaatggtatgtttcatcaacacactctgccagactataaacaacatactgatctcttagaagatatggttataaagctttattctaaaggtgtaaccactagagaaatagctaatttgatcgaaaaaatgtatggcagtcattatagtccagctcaagtgtctaatatctctaagcaaatgattcctaaagttgaggcttatcacaagcgtaagctgagcgataagttcttttgtgtttatcttgatacaacgtatataccgttgcgtcgagaaacttttgaacgagaagcagtatatattgccattggcatcaagcctaatggtcacaaggaagttatcgactactgcattgcgcctagtgagaatattgaagtctggacggcgttgctccagaacatgaaatctcgtggtttaaagcaagtagagcttttcctttcagatggcgttgtcggcatgaaagcagcactggcaaagacctatcctcaagctcatttccaacgctgcttggtccatgttatgcgcaacatctgcgctaaagtacgcgtggacgatcgcgaggcaatcatgaacgaattcaagcagattcaccagcaagccaataaagcggctgctgttgatgtattgcatgctttttatgccaaatggaacaagagctacaatcgtgtcattagaaacctgaaagacatcgagccagacctgcttgttttttataattatcctaagcagatcagggcttcaatttactctaccaacatgatcgaatcctttaataacgtcattaagcgcaaggctaagcctaaagcggagttcccgactgaacagtcgcttgatacttttattggcatccaagcaatgagctacaatgaccgctacttcaaccgaattcacaaaggctttggtcaagtccaggataccttagaatcctattttgaataaataaaacgttaaaaaaacaatttacgagaaagatctatttacacaaaaaatttgacagtttctgtattttcgtaagctttatagtttttatgttctaataatcattgagtcatttaatatttgttcattatatatatttactaaaacataccgttttggtataatgtctatatcaggtgaaagaatggaatattttgcagaaactaaaaaactcacaaaaatattgaataataaacgattattgataaaaatagagccaaaaaaattttagatcgtttagattaatttagcgctgctaacaatttatcggaaattccatctgatcctccgcctcgttgccatccgttaactggtaatttaaataataagtttgctgttgatgtaagtggaaattatagaatgatttttgaaggctatgataaaaacgatgaactttcgataaagaaaagtgggatagtttcaattgaggattatcactaaaaggagtgattgcatgttgcatcgtgagaataaaattaaagaatatcatacttcatcagccgctaatcttttaaaagaagttatggattattacgacattactcaaaaagatttagctgctagaattggggtaagccagaaaaatatatcagatattttaaatagaaaaagatttctaacagaagtgttagctttaagaattgaaaaaataatgggtatttcaagtaagttgctattagcactagattcgaattataaattgaacttagctaaagcgaatataaataatcagcaaaaaagctcacctctttttttaaaaaaatatgattgggttaatcataatacgtccaacttgagttttaactagaataaggaagcaagattaaaaagttttgcttccttatattttttaccgttgcaggtcaaaacttaacacttttgacctgttatttgtgatttaataatgatactatttttataggtatttaagagcatttttaaaacaggtcaaaagtacaggtcaaaacttaatgaaaaaagaatcaaaaaatataaaaaagaacaaaatagtagatcaatttgagtttgatgaatttcaaaaatggaaaattgaaaaagaaaaagaaagaataaaaacccatgttccgacaatttatggatatgccagagtttcaactgaagaacagcatttagagcctcaaataaaacaattgaaaaattcaggagctaaaaaaatatatcaagaaaaatggacaggcacaacaaccaaaagaccgatatttgaaaaactaattagtttactcctttccggagatactttaatggttactaaacttgatcgttttgctagaaatactcaagaggccttaacaacagtggaagacttaaataaacgaggtataaaaattaatatacttaatatgggctattttgatgatagtccaaatgaaaaacttatgtttactatgttttcggcttttgcgcaatttgaacgtgatttaattgtcagccgtacccaagaaggcaaggcctatgctaaaaagtatgatcctcattataaagacggtcgtcctaaaaaatttacagaagaacaggtagaattggcttgggagctaagaaaacaagggaatacatataaaatgattaacagaaagactggcattagtatcaaaacgttgcagcgtcgttttaacgaattaaagttaaaagattccgagtaaattagttagcatatttgcaatataaataggaagaaaaaataattttgatataaaaaaatagggagaaaaaactatgttgaaatatccaaaagattatctagatgatgtcatggtcagatttgcttataattcaaacgcaattgagggcaataaattaactttgggacagactagggcagttattttgaatgaaactataacttctactggaattgaaggggttaagttgaaggatttatatgctgctgataatcagaaagacgcttttaatgaattaatatatttggctaataataatgctccgcttaatatggataccctgttaaaacttcaatttgaattgacaaaaaatactattactatagctggtaagtttaaaacaaatgaaaattatattgcaggagcggattttaagacggcttcaccacaagtggtatatcaattaatgcatgaatggatagataatacgtcatttagaattgaaaattctaaaaatgatgatgaattattacgtactttgattgaaacgcacattgattttgaaagaatgcacccatttgacgatggaaatggcagaacaggaagagaattaattaatttagagctagcaaaacatgaaatgtcttttttagtagttagggtaactgatcgtccattttatttacagaatcttgcagatagaaacgtagataatttagtagggtatgctaaagaaagaatggcagaagaaaaagatagatatacggcttatgtttcttaaaatcaaaaacaagaacaattctacaaagatgagatcaaaaaattagatgaaagtactatatcagctaagatatacggggtaagagatacaagtgcttttgataagactgatatacaattaaatagggtgtatgcacgaaaatttttaaaagagaatccttttgaagtaagtgacaaaaatataaaagaaatatctgaaaatatagctttaaatagaataaataatcgagaaaaaaataaggatttcagtgtacaagcagggtataaaagcgaaaaagaaaaacttgataattcattggtaaaaaagacttataataataaatttaaagagcataacaatcacatatcgaaagaattatatccgtctaagacacaagatcaaaatttagaaatatgattatttctttgaaatatttggtagaaagagctgcttagacataatgctgagtagctttttatttaattgaagttacattaagtacaccctaaagttaaacagatatgtttaaatcttataattacaaataggaagaaatagaaaatgtagtttaataattcaatttattaaatagaaataatttaaggaaagaaggtagcataatgattttacaaaataaatatagcctgacaactgatcaaaacagaagactagctatacaaaatctaacacgtcttgtatatacaaattcccgctttgaggggttaacaacaacattgcctcaaactcaaaccattattgatggattaggtgttgatggcgtttctattgatgatattaatactattgttcaattaaaaaggggctggcaatacattatcaatgatccagagccacttactttcaataaaatgaagtcaattaataaaattgtggctctacatgacgcacttgaaccaggagcaataagaaccggttcttctcaagtagttctcgcagctgatgccacgtatactcctgaaattcctgatgaaacaaaagaaaaagagtattttgaagatctgatgagtaaagacataagtacaacagataaagctatgacgttgatgtaccacaatatgaggaatcaaatattctgggacggaaataaaagatcagctactttagcagccaataagatcatgattgatggtggcgctggattgcttaatgttcctttggacaaatggggaaaatggaatgaattgattagcgattattaccgtactaataagatggaaagaatcaaagattggacctatcaaaatggtattcaaggaattgatctcgatcaaaaacaaagaactcaaaataatgcggaagaacaattaaatcgagtatatgctaagaaatttttaaaagaaaatcattttgcaactaataaaagtaatatttctaaaatggtgaaaaatattgaaattgacagaaagaatgctaaataaaagcataaagatacaagtgctaaggctgcctatgaaacggaaaagaaggtatttaataatcctagtgtaagagcaaattataaaaagcaatttacaagtcaagatactaaaaataaaaaagattataaatatcaaatgcaagatcaaaatttagaaagataagtcttgctactaataatatattaaagaggttgcttaagcataatgctggtaaccttttttattcgataagtgtaacattaagcacaccctaatgttacactaaacagatatatttaatacaacatcttctaatttatgataaaataagacgtaagaggtaagacgtaaatagtaacaagtgaaaaggagaataccatggataatccatatactggaaaaatatcccaaaagggtcagttagtaattcctgcagcaattagaaaggctttaggtttagataaaggggctaaagtctcttttgaagtaaaaaataatgaagtaattgtaaaaaagcttccgacagccttagattggtcaaatttaattgctgaattacctgaagaaaaggttgagattgataaaaacggtcagtatgatcccaaaaaatctcctaattttcatgactggatggttaatggctaatgaaaccgatggagatttacattgcagacgtaccatttgatgataaagatgattcaaaaatacgtccggctttagtggttaaagtcagtaacgaacgtgtaaatatatttaaagtaacaacaaaatttaaaaataaatctaaaaagataaggcgactatattatccaataaaaaaatggaaactgtcaaattttttgtgtaaatagatctttctcgtaaattgtttttttaacgttttatttattcaaaataggattctaaggtatcctggacttgaccaaagcctttgtgaattcggttgaagtagcggtcattgtagctcattgcttggatgccaataaaagtatcaagcgactgttcagtcgggaactccgctttaggcttagccttgcgcttaatgacgttattaaaggattcgatcatgttggtagagtaaattgaagccctgatctgcttaggataattataaaaaacaagcaggtctggctcgatgtctttcaggtttctaatgacacgattgtagctcttgttccatttggcataaaaagcatgcaatacatcaacagcagccgctttattggcttgctggtgaatctgcttgaattcgttcatgattgcctcgcgatcgtccacgcgtactttagcgcagatgttgcgcataacatggaccaagcagcgttggaaatgagcttgaggataggtctttgccagtgctgctttcatgccgacaacgccatctgaaaggaaaagctctacttgctttaaaccacgagatttcatgttctggagcaacgccgtccagacttcaatattctcactaggcgcaatgcagtagtcgataacttccttgtgaccattaggcttgatgccaatggcaatatatactgcttctcgttcaaaagtttctcgacgcaacggtatatacgttgtatcaagataaacacaaaagaacttatcgctcagcttacgcttgtgataagcctcaactttaggaatcatttgcttagagatattagacacttgagctggactataatgactgccatacattttttcgatcaaattagctatttctctagtggttacacctttagaataaagctttataaccatatcttctaagagatcagtatgttgtttatagtctggcagagtgtgttgatgaaacataccattgcgatctcgtggcacttgtacctcaattgatccaaactgggtatcaattttacggaaatacgcaccatttctagaattaccagtattccagccatttctagcatagggatcatatcctaaaaaggcagtcagttcagattctaacatgtcattaacagcttgttggatttcatgacgaagcaaatcattaattttatcttgattgaatagagcttgagttatatttttggtaaaatcattcatgaaggagttcttctttctgtatgttttttttgttcaaaccaatcatacgagaaaggaactcctttttctaatgttttaggaaattaaattaaggaataattcatccttacacaaactattttacggtctctaaaatctcctacgatacttatataaaaagtagatcaatttacttacgccaatataaatatgcactagaatatgatgattcttacatactttattcaggtattttttctttctatataaatttatttaaggaaaaaatacctcgctacactgtaataaaaaagaaaaatctaacccttcaacaaaaagagattataagaaatcatgtcattaattggaaggttgtaaaatattaaacacattaacacattttttagtaaaaattatgcagctaatactactgcaggaagtaattgcggaattacggctattcccaaacctataattgctaaaacccctattactatagctactccttttaacatttcaccaatcctttgcgttaataatttaaagtcaaattctggaactggaataggttgtggaactggactcggactaacaggttgtgggttaggttttacaaaatctaaaggtacaactttaaacttaaaaataacagataattcatttgtcaaaagtctattttctagcttctgaatattataaataattgaacagcttacttttccatctactggtgcttcagttttgatagttaaactgcctgcactaattgatgatactaagcgcatttctcccatttttccaaatactgcatctaccgttgcttgtcgattattaaataatggtcctaataacccacttaaattagctccatcaagtttaccattactgatgttaaaggttggattaccacctgtcccagtaaaactttcttcaaattcaacactttcttcaagcattggagttttaataagaggatattcttggttaaagctaatacttgttaaattcaatagagaacctaaaatatctaaggcttcattagcggaaataggtttagtagatgtagatggtaatctgaacttcttactacctttatcactaccagaagctgctacttgatcaatatctgtaccaccaattgtatactcgacaaattgatcaaaagcccaattttctggcatttcaaagcctagatttccactccagccataagacatatctgccacaaaacttgcagaaataccatcttcaataccatgaagacaaacattacgtgtcccataaacccctgcttcgtattcacaatttacaaagacattatgaatagcacgtaaatatggatcaacagttccgtcaatatctccatcttgaatatctacatcaaccgcaaagtagatagttgtacctgctgggaagccaagatttctagcatttacaattgcagtaacagcatcactataaccttgtttagaattgaaatagctaacctcataacctccatcttcataaattggaaaaatagctagaccagcgttagtaattcttctgatttcgtctgtagttaagtttttagggcgtttattagcacctacaccaaccgaaccagttaagtagcgacgaactacactaaacccatatcgtttaaagttagcgatatcagtatccgttaattgttttgatgtatctaatgcaattgaatcacggttagtattaccattacttgttaatagccctttaataacagttaaatcagctgtagtacttgtttcaggagctaatttcataaattttctaaatgctactacttcttcaccaatttttgaagaagcgatacataagcaatatcgcttcttggctagtggaacagccacaaaaaagaaaaatcatcactttcgtggttctttttgtttaaaaaactactaggatgatgtataatttaacttgaacgaagtagtgaacaaaaaagacaccttggcagaggtgtcttttaactttttagcgttgttagttttcaacggctctagaagagttattttttatgcttatcaaagaacttagcgagcagataagaactgacttgcaacgtgataccaaccacgatggggcagataattccgttaagaagtagtgaaaacataagtctctccttcctaaccgaggcttagtggaaaaacaccccgcaaatattttagcaaaagaaaaggataccgcataggtaatcctttttattttgttatttaccccaaaatttcttcgtatacttttatatcttctggatcgggacaatagtaactatctagcaattcttcaatatctaccttattaggtttccaaccttccatatgattgttaagaacgctaaacttaattattttaaatgcttccttattcggaacatgcacatcttgaatagtttgtgcttcatcatctatttttagtttgtaagtcatatatatactcaatttattttgatgtcctttgacattctttattctactttctttataaaaagctttgatattaaatccccttaaaacacgaaaactatatagactaaaagatattatctaaaaactgaaataacaaccagaaagggtttaatatcacatgattatatctgatttaactgaaaaaaatattgatacgagcatccccccataaaaaatacacaacccttgcaaagcacaagaattgtgtattatcaatcatttaaaaatgtatggtatctaattattacaaactttcaatttttattcctacatcattgcctaaatgttttttcaatgtagcaattacatcttccattcctttagcaaaacgaatgtagtaaacatggcctttactttgtaattccattacaacgtagcttttattattagttaatggtgcattaataagcgtaatttgatctaaatctgaatatttaatagttcttctaatataaccactaatgacaattcgcttctcacctaagccacttactccatccattacagacattaccaaaaagactgctaataaaaccggtgcgcccgcttgagtaatatcaataaaattccaagaaatggacacatagacgaagacaactgcccaaataattgaagaaatacggtagcggcccgggtaatcaacaactgcttgccaataccagctgtaaacaatatagccaataatcagtaagtcaaaaagaccataaaataagctagtcataaaatcaccttccgttcctttaaattatattataacaaacaagtgcattataatttagttagatgtttacttaagaaggtacaaaaatgcaagaaaatattcaagacctaaaatctgctttaaaacaagctcaacatattgtctttttaactggcgctggagtttcaacccattcaaatatacctgattaccgttctaaatcaggtatttatcacggaactgaattaccgccagagattattttaagtgaagatacattgtatcatcagcctaatttattttatcaatttgtaatgaacaacatgtattttccaaaggcccagcccaatttcatccaccaaaagattgcagagatttgtaataaaaaaggaactctaattacccaaaatattgatggcctagactctaaagctggcaataaacatgtaatagaattccatggaaacttatataatatatattgtacgaaatgtcttaaaaaactatcttatagtatctatcaaaagtcctataaacatcagtgtggtggtatcattagaccagatatcgttttatatggtgaagggattgaccaacaaaaacttgcaaaatctatctcttatatccaagaggcagacttaataattattattggaactagctttgtagtctatccctttgccggtttattagcttaccgccaaaaagacgctccagtttgggcaattaataaaaccaaaatagaagcctcaagtatcagacaaatcaatggtgatgccttaactattttgaaagacttgtaaaatattctttcaaaattacagcttgattataaagtggatcttttgcaccatataaaaagataacatcactctcttttaatttttcttgaattaattctacaaaagatttagtttcaggatttgccttaatttcagccagatattttgctttaaattccggaaatttttggggatcgtgattaaaccacttacgtaactcattgcttggccccatttccttagcccaaacatctaaatcggctttaactttactaattcctctaggccacaagcgatctactaaaactcggaagcccttttcttgttcatgactataaattcgaaccaattttatttcagacatttagataacttctttcccatattgtatttattatttgttatagcaggtatttatgaattatcaaaacttttttcaaaatcgtcctacaactgaaattgcccaagacttgttaggaagaacattaacatatgaaaataatggcgaaattttaggtggcttaattgtcgaaactgaagcataccttggtccaaaagattatgctgcacactcatataacggccgaagaagtccagctaatgaaggactatattgtcccggaggctacttatatatctacgcccaaaggcaatacttcttcttcgatattgctacacaagaaaaagataaccctgaaggagttttaattagagctattgagcctacgctaggaattaaaactatgattaaaaatcgttcaggaaaaactggatttttattaactaatggaccagcaaaaatgatgcaagcgttcggcgttacaagtcgcaaatgggatcttcatcctattgaaaaaactccattttctgttgatttaactaccaaaaaagctatcaaagaaattgcttctgggccaagaattggagtccgacaagataacgattggtcaaaacgaccattacgcttttatgttgctgggaatccatatgtttctgacatgaaaaagaaaaatattcaagaaaataacggctgggtgttgacaaagtaattttcttaatatattcttaagcacagttaaataaataatccaatgcaatagaggttgcgacaagtcacaaacattccggagtccgcgaagattttgaaggaatctaaaggattgtcgccgaaatgattaactaattcgcgttagctagttgttgggctacaagagcatatcttgtagactgtcctggagtccccagggagcgctatctgatttggtagataatactgatgattaaaccctattgtttttagtgaacaatagggatttttttattgctctttattgtattggctttagttgattaattttggaggttttatcaagtgaagtcaaaaaatacttggctagtaattctagcatttttaatggcatcaattggattttttggaaataacaaccaagaagttcaagctgccaaaagcaatggtgtttcaagaattgggctggaagcaaactatcccccatacaactggacacaaacaaacagtagcaatggcgcaattccaattgaaggttcaaagacctatgctaatggttacgatgttcaaatcgctaagttaattggtaaaaagttgggtaaaaaagttgtcgctgtaaaaactgaatgggatggacttttacctgctttaacaagtggcaagattgacttaattatcgctggtatgagtccaacagccgaaagaagaaaggctattaacttctcaaacccatacagaaagtcaacttttgttgttattactaagagtaacagtaaatatgctaatgctaagagcttgactgattttgctggtgcaaagttaaccgctcaacaaggtactttacactacgacttaattaaacaattaaagggggctgttcgtgaaaatgccatgaaagacttcgccgcaatgcgtcaaagtttaatttctggcacgattgatggttatgtagctgaagatattgaagctcaaagtttcaagagtgtttaccctaactcaactgccattaacatcagcaagatgcctggtttccacgtttcagctagcgatagcgaaacttcaattggggttaagaaaggtaatgacaagcttttagctcaagtaaatgctgctttagcaactatttcaaattctaaacgtgaccaattaatggaaactgctgttaaagagcaaccttctactgacagtgacaagaagaccaactggtttgtttcaacttggaacacttacggttcaatgattcttgccggtgttggtatgacacttttgcttgccttagttggtactattgcaggtttctttatcggtttggttgtcggagttatcagaactattcctactccaacttctttacttaaccgctggttattaaaggttgttaacttcttactttctgtttatgttgaagtcttccgtggaactcctatgatggttcaagcagctgttatttactacggaatcgctcaattttggcaccttaacttgaacagaactgtagcagctttagtaattgtttctattaatactggtgcctaccttgccgaagttatccgtggtggtatcatggcaactcctaagggtcaattcgaagctgctagtgcattaggtatgactcacaatcaaagaatgtggaatatcattttgccacaagcaattaagaactgtttaccatcaattactaatgaatttatcgtaaacattaaggatacttcagtattaagtattatttctgtttcagaattgttctttgttggttcaacaattgccagtcaaagcttccaattcttccaaacttacttgatgatttcagcaatttacttagtacttactttctcaattactagaattttcaacttaattgaaaagaaactacaaggtcctaagaattacaatctaatggctaaccaagtccaagtcggtacacctgaagaacaaggaggaaacaactaatgagtgaaaatatcatcaatgttaatcacttacaaaaaaactacggtgatcaccaagtattgcgtgatattacctttgatataaaaaaaggtgaaattgtttcaatcatcggtccttctggtggtggtaagtcaaccatgcttagatgtatcaacttgcttgaagaaccaactagtggcgaaattaacttcaacggtagtgacattaccaagcctggcttcaatcgtaacgattaccgttctaaagtcggtatggttttccaacaatttgacttatttgaaaacaagaacgttttacaaaactgtatgattggacaagaattagtcttaaagcgttcaaaagaagaagcaaaaaagattgctttagagaacttaaagaaagtcggtatggatccattcattgatgctaagcctaagcaattatctggtgggcaacaacaaagagtcgctattgcccgggcaatatctatgaatccagatgttttactctttgatgaaccaactagtgcccttgacccagaaatggttggagaagttcttgatgttatgcaaaagctagcaacaactggtttaacaatgattattgttactcacgaaatggcctttgctaagcatgtttctgacaaagttatctttatgagtgatggtgtgattactgaacaaggcagtcctgaagatatttttgatcatcctcaagaagaaaagacgcaaaagttcttacgtaactttagaaaagaagacatttaataaaagatgatatagaaatagctatccctaattggcagggatagctattttttatccttcaagaaattctgacatatgctgtgcgtaggcttccattcctagccaggcacaaatttcgattgctttttggcatttttttaaatactttgtagcattcgagcttttatatagagccatatttttatagaaaataatattatttttataaaagactaaatcgggagaacttggaattgcatcagctattgacaccaacttatctattccttcatattctccaatcttaagttttaaaaatagattattacaaataattcctaaaagggttctcttaagctctttagaaaatggtggtttatattcttttaaaatatcctgaacaatcaaattaacactaaaacaatcgtataaaggcattaagttacaaaaaagcgttaatttttcttcattccaattcggaagactgaaaactttttctctgagttgttcccgtagtttccaatttactggttcagttgaacttttatcaatttcaagatatccacgagcaattagtatctgctctttttttacttcttcaggtaaaagacttctttctatcaagttagggattttttcaagtgaatctttatcgccattataatgagcagccactatcatttcatgaaaaagattaagctgcttggccaaatcttgagaatcaaacattccaaaaaaatcacttaatcggatattgtttctttttagcagttcaatcaaatcttcagctgatacccgatgagagcctttttcaatcttacagtagtaagatgggctaattacatcagaagcaaattctttacgtgttttgccttgttcgaggcgaaatttttgtaacaactctccaattttcatcatcattcccccatttttaggagtaatgataattggaatttagtatgtttgcaagttatatgcacaaaaagcaaaaccaagtgtctatcatttactttttaatctaataactaaaaagtaatatattgcacttaaaaataaagcaaagccataaatatattgtgtgctaagtgagccccatgatttaacaatccagcctccaaatatagatccgataggaatcataattgacaaaatactgtcattaatggtttgaactcgtccaagtattgccgaagaaaagctcacctgcactaaagcctcaaaattcgtattcatcattgttatccaagctgatgaaattgccgaagataaaagcaaaatccaaatatttaagttgacggatagaggaactataagtcggaaaattgccgcccccaaaaagcagattgctacgaaaaggcgcatctcttttttgctagccttaaatttttgaactaaaaaggctcctaatactcctccaatagacgatgcgagtagtaattcgccatatccgattatcgaattatggatgtaatcttgcgcaaaatatggtaaaccaacagtgaagattccgtaaaagaaattgacgactccaagtggcaaaattaattccagaatatttttttctttttttaatgttttccagccaatcagaatgtcatttaagtatgaatcagagaaatattcatcttcctcgaggatatctttagcagatactgagatatttacatgggcataaaagagtaaagccaaggcgaaaactaaggctgataaaatcaccgttgcatcaatagaaaagagggcaattattacagttaccccagcatcaagaatcatatctagggtagtgaaagttacttgaaacaagccattaaaccgtaaaatttctctttcaggaaccagtactggcagtaatttgtattgggctgggtaaattatggcggataaaatagttgatgcaataaataaaagcatcaaaacaattgtcatcaaaagattgtggaattgtgttattaaggctaaaaataccacaatactaattaaggcctgcaagattgtcgaaattttaagcaactttttaatcgaaacgcggtcgataatcgggccaaacccaaaagaaagcatatcaattcctgaagtaattgcgaagatgatggaaacactcattgtcgaatgagttacttgcttaaagtaccataaaatcgctagataaaataaactgtcggcgatgttagtagcgacgcgaccagctaaaagagtataaacactgagatttttctttagttttaacatgattaattatctttctctagtttatgttaataataaaggagattactagaaagcaagctcttttgtatcatatttgttacatatttatttttgaccaactttttactactttttcatatccatactttttcaacatatcctgaatgtgattagcggatttataatcacctttaattaaacacttaaagtatatagcaaagaatctataaatcataaaatgaaatacattttctgttaaatctaaaatagtcttgatagttttttcaacctttattttttcttgagctgtaacataagtttttctttcataacaaatcccaagatagttctctaacaagcgtaaatatctttctatcataatctttgatatacttttatttttttggatgtacgctaacaatctaccaattaaaaaatccagatgttcctgagaccacatcggcattgtattagctagtaatctcaatagttctggacgtgtaatccaatttttcccctcatcaaattgctcataaatctccttaattgtctgttgatcaatttgctctagcttattctcaagataggctacagatacaatactcctcaattttaatattttgtgcccaggcaatacatgcacttgtttacaatattcttttaattgttgcaaatctttccgatcaaatgtaaacatcattttattctgtaaatattcactcatttggttttctttcggcatgtaagtttcttttaacaacttataaaatgaagagatatctatttcatgtaaaaataatattttagcaagactttctgcactgatacttgtttgattactttcaacttttacatagaatgggcgactaacaatcccttcacacatttgtttttgagtaagtcctctttctaatctaaccttttttaatgcgtcacctattgtcattgcttttacctcataaatattatttttctttaaaagcttaatttataaatattgtacaaaaaaatggtaaaaacagcactcacactgcttcacttcaaaatgtcatatccgccattttctctttccatctcaaacttttctataaaatatttcataaatatccactatagaaaggttatacaaaatgaaagtcttctttaaaaactcaaattttcgtctttttgcaactggtagttttctttcaagcgatggtgatgttttattctacctagccttcatgacctatgccagcaacttaaaaaattattctttagcaatttccttaatcgcaattagtgaagctattccgaagtttttcacactttttggtggttaccttgccgacaaaacaagagataaatttaagagtatttttaaccttgccttagttagatgtattctttataccatcgtcggcttattattaacgaccaaaatgagtgattggaatttggtaatgtgtattgctttagcgaactttatttcagacacctttggtacttattcaagtggcttagttacacctttaattgttgctatcttaggtaaggaaaactacgccgaaggtagtggttttgctaatggtatgtcacaaacaatctcaatgcttgctcgctttgctggtgctagcatgttgctatttatgtcatattcttcattagcatttatcaacgctgctacttttttaatcgctggtatcttatttgctttagttggtaaacgagtaaacacacaaaaattgccacttcctaaatcaaataaattaaacttcttccaaacactaaaaacatcttttaagcaagtaaaaaagcaaaacaatcttttaaccatgatttctatcttagttttgcttaacgctgtcttagcggtactaattcctctatttacaattattttggcaactcataagcaaaccatgcttattggtagttacagctttactttggcaatcggagaaacaattgttggcagcggtatgattttaggtagtttatttggtcctactatcttcaaaaagacttctgttttcttactagcaatttattcaagtatcttggcactttttgctagtttaagtttgttcattaacaatttatttgttattttaggaacctttgccttgctaactttctttgtagcgacaatttctttaaaaatgaatcagtggctcatttcttccgtagaatcaagcattctaggctctactgctagcttattaaataccttgttaatggctagcgacccatttatgacgatgctgctctcaagtattactgccatcagcaatgtctacatcgctatttctgttctactatgctttaacgttttagttatctttttaatcatcacagcttatttgaaaaataaagccttaaaagctaatatccctcttgctgagtcagaagcttaaactagttatttgtattcttgctttttaattatttataatgaaaataactattgaaacagaaaggatacactatgactcacaagcaaaataaagtagatgctagttctggttcatcttttaccgaaaaattagagcaagaagccccacaagtttggcctggtcctaaaggtatgattcccgttactagtggccgcgctgatgatgccaatgtccacaatcgtaattatttagacaatattttagttgaaatgcgcatcattgatgctgtaaagcctgatctaacaactgaattttttggcaaaaaatacgcttcaccaatcaatctagcagcggtatctcacttaaataaggttttacctgacaagagccgcaagccaatgcaagagaaagttcaagctgctaaaagtcaaaatgtcttaaactggattggcatggaaagtaatcaagactacgccgaaattgtcaaaaatagcggcgataccgttagaattgttaaaccttttgccgaacacgaagacattatcaatgaattgcgctttgctcaagatttaggagccgttgctgttggtatggatattgatcacgttcccggtgaagatggcaagtatgatgttgttgacggcattaacttaggtccggttactttttcagatttaagaagatatgctcatacaacaaaccttccgtttgttgctaaaggcgttttatctgttcaagatgcgctcaaagctagagatgctggtgctagtgcaatcgttgtttctcaccaccatggtcgcttaccttttggtgttccaccactaaaaatgttacccgcaattaaagacgctcttgccgatagcaatatgaccatttttgttgatggttcattaatgactggttatgatgtctacaaggctatggctatgggtgctgatggtgtcttagtagggcgcgcaattttatctgaattattgcaagctggccaaaaagccactgaagaaaaaatcaagctgcttaacgagcaattatcacaaatgatgctttatactggcatcactgacactaagtcatttgatagcagtgtacttcattttaattaaacaaaaataatattacaaaaggctaggatttacctagccttatttctttactttaattcttcatttaaatgattttgcatttcaaaaacttctgtttctaactttccactttgcaagccattttctacttgatagtctgcatcgtccatcacactataatattttttaaattttggctcaacattaccagaatttaaaattgcattcaacttttgagttgttaagttgctcccctcgcttactagcattttcttcattgccgtactttgagcaatcttttttaagggactaaccccttgcgaatatttaattaattcagtttgaacatctttagatactagtaatttcataaactgccaagcgagtgtagcgttgcgactatgagaagaaattccaaatgaaacattagctagcttagttcccctttttttactcatacttggcatttttattacatcccaattaaagttagaatttctagttacatgataaggataagatgtatatgttcgatattgcgccaaagtcatcggtgaaaaggcaacctttccctggtcaaacattgcactagttacgtttatattattatttaattgctcaagctcagttatcaaattaagcccttgcattactttattcgaagttaattgcgatttagtaccatcactagtaaataattgtccttgatagctatttacagctgcttgccaattaaaattttctgtaacaccataataatctttttgacgaagttttttattcaatagctcaagctgtgttggttgccagtcaaaattaggaattttcagtttagctttagccagtaaactagtatttacaaccattaaacttggatttacttcaaaaggaagcgctagttgctgattgtgatattgtccactttctaatgcagcttgataaaaatcactcgtcttaaatttatcatgtctaatatagccatttaaatctagcaaggccccatcacttgctaaaatattaaaagtatttgctggtacaataaaaacatctggttctgtacctttaactaagctattagctagccatgagcgatagttggtcttagttattcctgattcatagattactcgaacgtttggatatctttttttgaactttttaaccacataatcaatcatgtggtatgaatccccttgtggtacatcccaataactaccagtatatacaccgattgttaatgtcttgggttcactcgaaattttagcaaaataagttacacttcccattaacaacaataaaaaaatagtaactatcattaacttggctttatttttttccattttattctccaaaatctcgagaagttacacctgtttgaacggcccaaattgctaattgtgtacgaccacgcaaatctaattgacttaaaattgaggaaatatagttacgaactgtcccttctgataaatataattttgcagaaatttctttatttgataatcctaatcccacttgttgaattacacgccattcatttttagaaaaatgcttactttctgtttgatcaacttgaattgcataattagattgggccatcttagaaaataatttgaatactttttcagcaatattaggattaatcattgcacctccctgataaactgtttcaattgcttgataaagttgatcattggaaactccctttaataagtaacctgaagcgccatattttaaagcactaaaaataaaatcatcatcatcaaaagtagtcaaaattattactttaatttctggatacttactttttacatatttagtgcatacagttccgtccatttttggcattctcacatccatcaagataacatctggacgttctttttttattgcgtccaaaacttcttcgccatctgctactgttgcagttaccttaaatttaggattagcttctaagataatttgaatagaacttctgattaactcttgatcatctgcaattaaaactttaatcatggtttgctccttccttgggaatttctacttttatctcgaatccatccccactcttaaattcaatgtgtccgccaataattgccacacgttctttcatttgtgttaaaccaaatcctggctttattttactgcaacctgagccattgtcttttattaagatctgataatttttatttactaaaaaatgaatacttacttgactagcatgaccatgtcttaacgcattagttacactttcttccacaattctgaaaatcacatcttccgttgttttttcaaattctgcactcccccattcatattgaaaatcaaacttcatttgtgataattctgaatactcacttaacatcttctttagtgctgcttgcaaagtataattttctaatgctcctggcctcaacttatttaatgctgctcgaatcccttcaagtccctgctttactacttgagaaaccttagttagttgctctttggccttctcagggtttaaatcgattaaaactttagctgcatccacacctgcaataacaccagttaaggcatgaccaactgaatcatgcaaatcacgtgcaattctttttctttcgcgatcttcagcgatatgactagataaagctgcataatttttcaattctaaatttgtttgtgctgctttagctaatttctcttttatctcgtattcacgattatgaagataaattgcgtacagtaccaagattcccataaagataatcagattaacaacatttaagacattacttatcaaaattactgtcgtctttgtagctagtggtaaaaactcaatataagtatctaattgaggtatattagaaatattttcaattaaaactgtatctgtcaaagaaaaaataaccaaaataaatacagccatccctaaccataaattaagctgtctgcttggttctttatttcgcaaagaaataaataaatccacaaaataaagtaatatcacaccgttataagtgaatcttaaattccaaaaaaccaaaatagtcaaaaagaattcaattaacagtaaacgactattatgttcttcatcttttttaaaataatgacgataagtcattactattgctaacaaaagataactcaaagtacttgaccaaaaaatagtcaaaggggcacctggtaaaaagttaatcttatttaagaattcaaatgacatattgctttgtacaatataaacactagctaaataaaagactgaactattaaacaatactgctattaaattcagccaaactagtacccgtctaaaagcaataagtttcttaaaactacccttcattattgccaccctgtaacgttataatttttgatgttatccttggtaatcagatgcactggtaacttaattttggacttaacacttttgcctgctaataagtcataagttaacttataagctagcttccccatctctttaggtgactgagcagctgttgctattgcattttgattattcaaaagtaattgtttcatgttggcagaaccatcaacgctataaactcctacttgctttactttttgactatctaatgctgcaattgcccccacagcagcttgatcatttaaagacataattgtatcgaagtcagcttgcgtttttaaccgctttaaaacagctggataagcatattctgattgtcctaaagtgtttaatttacctaccacatgatagtttttattaaataaagtatctgtaaatcccctaatacgatcattggcactcatggcactatagtgttccagcagtaaaatattggctctctttttcttcttcatcaaggctttcgcacacaaaacaccagcttgataattatcagaaagtagtgttgcatcaacatgagccttatctgccatttggctatctactactacaatttttatttcttttttatgtgccttattcaaaattgctattaacttattattatttccatcaacaggattgataataattgctgaagcaccttttttaataaagtcatttatctgattaacttgtttttgagcatctaatgctggatcacgaattatcaacttatcggctcgagcatcaactcgtttttcaacttcttcatttaaaacttgataaaagctattattcattgtcatataacttacgccaattatcttttgtcttttttggctttgagtaagaactgcaaaataaaaacaaaagacaattaacaaagctagcgctaatttacttaataaaaatagttttgttttcttactaattttcaagattctctaagacctcagcgattccatcatgattataatcagccgttatatatcgataatgcttctttaattcttctggtgcatttcccattaagtaaccttttccaacagtttttaacattctttcatcattatagttatctccaaaagctagtgtattactaatttcgacatgatagtagtcagacactcgtttaattgaatcagctttctctactccagaagcaactatttctaataaagtatccttagatttaactaaatataagttactgtagcgctgagaatagattttcagtaattcatccaagatatttttaggtcccattaccaaaactttatggatgcattttaaattttcaatttctgatacatcaatggctttagcacacaattttacaattttttcttcagctaataatgcttgagttttaggcttttgagttaaccaacttaaatcagaataaatattccaagttacacttgttaaatcatttaactctttaacaatttctctagcttcggctaaaggaagaggcttgctataaatttgtactccttcttcattaagaattaaggcaccattaaaagcagaaagtgggcacttaattcctagctgcttaatgacagtttgcatcgccaaaggacttcttgcggatacaggaacaaaaagattgcctttttttacttcttttaaaatactttccttagttcttggcaaaatttctaatttgtcatttatcaaggtaccatcaatatcgctaaaaataatccacataattcaatttccttccatatatttcctaatttaattgtaaccagagtattcttcaaactaaaagcattataaatgtaagcgcattacttaatgacatttgtcatatgatttttactactttttatgacatttttcacttatgtaatcgcttacagtagattatagtaaacttgtaaattatgaaaggagcaagtttatgaaatacttagtacttgttagccatggcggtttcgccgacggattaaaaacttcactagcaatgtttgctggagatcaaatcaaccgcgtatttgctttaggactcgaaccagggactagcgcagatactttcaaagaaaaagttaatcacttctttgatgaacacgatttttcaaatgatgaccaattttttgttttagctgatatcgtcggtggtagtcctttaactacttttactagtgttttatcagaacgtggcttcttggcaaattcacaaatctttggtgggacaaacttaacaatggctctaactactttagtttcaatggatgctatggacaaagcaactttaagttcaaccattttaagcgaagcagggaatgctcttgaagaattcaaggtggctgcacctgaagatgatgatgatgaaatttaaggaggaatttttatgtcagtatcatttgtaagaattgatgaccgtatgattcatgggcaaacagttactcgttgggctaaagaaatgccttgtgatggtattattgcagttaatgacgctgcaagtactaatcccgttttaaagcaagcatatatctcagcagctgaaagtcaaggaaagaaaggttttgtttggacacttgatcactttaaagatgttcaagaaaaagtacttgcttctagccgtagatatttcttaattactaaaaatccacttgatatgaaaaagattttagtagatatgggctttattcccgacgatgttaaaacaattattgtcggtcccggtaatgatcgtccaggcgcaattaaacttggcaataatcaaagctttactcctgaagaaggtgaagcttttgaagctatcagcaaggctggctacacagttaagttccaattattacctgacgtagaaattgggacttgggacaaatataagaacaagtttggtttttaatcacgagattatacgaggagaagaattatgactattagttggcttcaagccatcatcttaggtatttttgctagtttgtcatcaatgcctgggatgggtggtacttcaattggtaactatacattaggtcgtccattagttggtggacttgtctgtgggattgttttaggagatattaagctcgggattgcctgtggtgttgcaatgcaacttgtttacattgctttagttactccaggtggtactgtaagtgccgatgttcgggctgtttcttatattggtatccctttagcaatggttgctattcactcacaagggttaagtgctactggcgctgatgccgcaaaccttgctaagtctatgggtacgttggttggtactgttggtactgttttattctacggaacagctactatgaacttagtatggcaacatatgggatggaaagacgttgaaaaagggaaattccacaaactttatttagttgactgggcttatccttggatttctcacatttgcttttcattcattccaactttaattatgactaaacttggagcaactgccgttacagctttacgtaacgccttaccaatggatggtattccaatgaagaccctattcactgttggggctatgcttccatgtgttgggattgcaattttacttcgtcaaattgttaacactccagtagactttattccattcttagttggttttactttagctgcttcacttaaattaaacttagtttcagttgctatcgtttcattaattttcgcacttcttacttatcaactcgaaatggctcgtgcttctaaagcaatagcaccaaccacttcagatacaagtgccgatgacgacgaggaggatatttaaaatgacagatagaaagaaaattagtaaaaagactttaaataaagccttccaccattggtactacggtcacttaacatgtttctcacaagaacacatgcagacctttggttatttaacttccatgcttccaattgtcgaagaattatatgacaaaaaagatgaccaaaaagaagctatgaaaacctacacagcattcttcaatactgaaccacaacttgggtcaattatagttggtattactgccggactagaagaagctaaagctaacggtgatgctgttgacggtgaaaccatcaatggtatgcgtgcgggtttaatgggacctatcgccggaattggtgactccttgattgttggtactttaattccaattcttttaggtattgcacttggtatgtcaactggtggttcaccagttggtgcaatcttctacatcattgtttggaacttaattgcatactttggtatgcgttacctcttcttcagaggttatgaaatgggcgataaagccgttgaatttttagttggtgcacaaggtagtgcaatcagaaaagcaatcggtgttgttggtgcaatggttgttggtggtgttgccgcaacttgggtaaacatttcaactgcttttgaattgaaaaacgcctccggcaaaacttttttaagcttacaaaaacaatttgacagcatttatcctggattattaactgtattattcatcttattatgctggtggttaatgtctaagaagaaaatttctgcaattaacacaatgttaattttagttgctatcgcattcattggtgtacttgtaggattcttcaacccaggccttaaatactaattatatttttatttattattacatataaactacatcaaacttcataaaaaatatccaaaaggcgtcagcttctgtgttgacgttcttttgttataaaagtattagcttttttcttctttaatattgggaggatactatgtcacatgaacaattaaaaaaaggctatgaaactgaaatagcttatcaaaaacatatgcttcgtaatttaagctattattttgaactagctattttaatatcagctattggaatagttatgacttactacttttggggtaaaaatttacctattttattattaggaatctttataatgggcattggtctgcttgcaatgctaatattggcaacaggcgcaatccgtggtagaaagaacttaaatttagtcattgcagattataaaaagaaaataaagacagctacaactaaagaataagaggttaggaaaaatcctaacctcttatttctttatatgccatatccataattatccgcttttgttctggatattgcttaattaattcagcctgactaaataattcaaaatcttcataatcaaatccaggagctaccatacaactaaccagagcgaatttaccttcagctagctctgaaccaaaaataacaccagcaggcacaacaaacgataattgctcaccattgactagattttttcccagtttaactaactgataatggccatctggatataaacaatgtatttttaagctagctccatcatggtaataccaaacttcatcatgatttaacctatgcaaatgtgacttagtttcaggcgttagcaaaaaataaattgaggtaaaatattttcttttaccttctgccaactcatactcatcttttgcttgatatacttctttaaaatatcctccttcaggatgaagggctaaatttaatctttcaatatattcttttgcatccatatttttatctatttctttcgattaattaacttaataactagcccagctaaaacagtgattgcaactgaattgagcaaagtgctttgtaaattatggccacttacgccataccaaattaagcaagctaataaaatagctaattctcctacccaaaaagcatattttttaatgaattccatcttaaactccttaaacagttataacaacattataccaagcttttgaagtataatttaattataaaaattcatatacatctatggaggctccaatggaagaaaacactaaaaacatgctggctggcttgccttatcatcctagccaagaattagtcacaattgctcagaagagtcatcgcttgtgtcaagatttcaaccagctctatgatactgatattaagcgtcatgatattattgaccagcttcttggtaaacacggcaagaacacctattttcaaggtccaatttactttgattatggtgcctttactgaaatcggtgataacttttatgccaacactaacttaacagtgcttgatacttgccccgttaaaattggcaataatgtcatgattggtcctaactgtactttggctacaccactacatcccttacgttatcagcagcgtaacggtaacgggaaaacgcattatgaatatggtgctccgataacaattgaagataattgctggctcgctagcaatgttgttgtgaatcctggtgttacaattggtgctggcagtgtaattggatctggtagcgtagttactcgcaacgtaccagctaattcgctagttgtaggtgtcccaggtaaagtaatccggaaaattactgaagctgacaatttagatagttttcctgggtagactaataaacttatatattaaccacacaaaaaatgcaccatatggtgcatttttctttgttagtaaaattttatttgccaaaatatgactttaaaacagcaacgctttcttcacgtaaaacgtcactaatagcaacacctaaagaacctgaaatgttgattaataagtcaaacatctctgctccacgaccaatttctgattttggaataacgccagttacagtatcaagtagtggtgaatacataatcgtattaccaacaaaaaaacaagattgctccgattgataataccaaactacccagattaatgagagttcacttcacagatgaggataatcctaagctacatgacttccattacaatattaaggataatgtagcacaaaattgtaatcacttggaaatggaatgatttaagcagttcatttaaatctttacttagaataaattggtagattttctaaagttatattgcaaagtaaaaagagatatccttcagatatctctttttgtatgggttgttatatttcgtttttaaattttcttataaaatcttatcttcagttttcacatcaaagaatgaagctttgttcaaatcaaatcctaatttaatagtagcacctggttttacgaaatcacgagcatccacttttgatactaattcaaaatcacctactttacagtacaactgagtttcagaaccgagcaattcagaaacgactacttttgctgaaacagtattttcagggaaggtatttaagaataattcttcagaatgcatatcctctggtcttattcctaaaataacttcattttcttcataacctttctcagctaattgcttataaataccttctggaacaggaattgaaaaggcattgtttaaaacgactttgcccttttctagctggcagttaaagaagttcatagcgggagccccgataaaaccagcgacaaacttatttgcaggatgacgataaatttctagtggacttccaacttgttggattttaccatctttcatgacaacaattcgatctgctaaagtcatagcttctacttggtcatgagtaacatagatggttgtagtcttaagatcttggtgtattttagcaatttctgctctcatagaaactctaagcttcgcatccaagtttgataatggctcatccattaaaaagattggagcatcccgcacaattgcgcgtcctaaagcaactctctgtctttgaccaccggacaaatcagctggtttacgctttaaatatggttcaagtcccaatactttagcagcatcagtaactttcttgttaattgtagtcttatcaactttacgaatctttagtccaaatgccatattttcaaagacagtcatatgaggatataaggcataattttgaaaaaccatcgcaatgtctctatttttaggagccacatcattaacaactttgtcgttaatttttaaagttcccttggtaatatcttcaagtcctgcaatcattcttaaagtagttgatttgccacaacctgaaggtccaacaaagacaataaattcattatctttaatgtgtaaatcaaaatcagttacagaataattttcagctttatcatatttcttataaatatgattcaaatctatcgtagccatcgctatctctcacactctcttccttgtataagggtaacaatactgaaggttttttctttagcaaaaatttctaaagtagaattatcaaaaatcaaacttaactctttgctatctgcttgccagtgatattctttcttaaaagctggagaatgaactgttatcacgtattcattttcatcattaatacgcttaattttgacctctccatcttttccttggaacagatattgtgaacctaattcaaagataccctgaattcttggtgtttgattttttattgattgaatagcctttattttttccgttttaaatacaccaaatggcttttgaataacttttttgccatcttcagccaattcaagatatctaggaatggtcatcattccattccattggtgattagtatctaccaaatatgtttcattttccatacttctgaaccaagaaattagtaccctgctaccctcataattaaatgattgagttgcataaatatcagcattaccatctaaagccataaatttatcgcaagtaaattcagcttggtcccaatccatcttaccttcagcaagatatacctgactgcgctttgattctccccaaataacgcaaaaggttaagaaatctcttccatcaatagagaagaagtctggacactctgtcattattcctaacttactgaagtctttaaagatatttcctttgtaagtccagttccttaaatcatcagattcaaagagaataatattaccatgtttttgaattcctgcagctaaaaatagataatactttccatctctttgaataacttttggatctctaaaattctcaggttcaattccaggaattgtatctaaatctataacaggattttgatcatacttttggaaagtaacaccatctttagaataagctagacattgcgtttcatgtgcctgtcctttagcatcaactgaatggccagtataaagaacatataattggtcgtctttaacaattgcagatcctgaaaagacaccatctttatcatagctctcacttggttcaagagctacaggcatatcattccatgattgcaaatcacgactaattgcatgtccccaatgaatattaccccactgatttttgaaagggttatattgataaaataaatgatacattccattgtaataaatcaagccattaggatcattaagccatccaaacaaaggagtgaaatgcagattaggtcttgcaccatctttttctaatgctcttactttttcaaaaagaaaatcatttgctttcattacttatctccattacctgttgaacctaatccttggactaagtacttttggaagaaagcatatactaaaatcaaaggaattgtagaaatagctaataaagccatcacttggttcatatatacaggttgtgtattgttaatatttgttattgccacttgtaatgggaattggttagaatcattcaaaaccatcaatggccaaacatagtcattccaacttccgataaaggataaagtacctatagttgcaatagttggcttagccattggtaataagacgctccaaaagattctaaaactacctgcaccttctatttctgcagcttcacttacattggccggaattgcttcaaacgcatttctaaacatgtaaattgcaaatgggctcgacatccctggcaaaataactgccagcatagtatttaaaatacctaattgcttagcaacttggaattgctgaattaacaatgttgcaccaggaattaccatcaatgaaatcaaaaaggcaaacaaagcttttttgccccaaaaatcaaatttagcaaaagcataaccagctagtgagttaacaattaatgaacctgccgttagtgagattgcataaacaaccgagttcaaaatatatctaaaaataggaaaccgactaaataattgttgatatgctataccccaatctttaggattagtagaaggtaaaaatgcaaatatgctagtcatttgagaataaatatctttttcttgctttaaagatgatgcaatcatccagactaaagggaagataaagaataaagctagcatcataattaagaaagtggaaataatcaaatttgctttttttctgctcatctttatttttcctttctattagtaatacgtctttgaacgactgttaaaacaatgataattaatccataaatgacactgacagcagaagcataacctaattgacgatcagtaaaacctgtccgataaatgtaataaattggagtcatagttgaatattcaggtccaccttgggtcataaccattgattgtgtcatcaagttcaaagcagaaattaaggtagtagtaagaatcattactgtcgtcggctttaaaccaggtaaagtaatataaaggaacttcttccatttacttgcaccatctaattctgctgcttcataaagggattcaggtatgtcttgcaatcccgccaaaaagattaacatctggtaaccagcaccttgccaggcggaaatcccaataattacatacattgcttgcttagcagaagttaagaatggctgtggagccacatgaataatcttaagtaaactatttaaaagaccttgatcagggttaacaatatagagccacagaaccgaggtaacggtcagtgaaacaactaccggagcaaaaaatgcaattttgtaaaagagattaaaaggtctctttttattaacaataagtgctaatcccaaagccagcccaagttgaattggaataatgaagacaacgaattgagctatatttttaagactttgaagaaaaattccatctttaaaggtttgaatataatttgctaaaccaacgaacttttttgcatctggatttaaaatattgtaatcagtgaaagaatagctaattgacatagcaaaaggaatgataagaaaaatcagcaataagaggattgcgggtaggacgaatagccaacctatttgatttcgcaaaactttatttttcatatctaaaaatcccttctaaactacttaaggtatttttgcattgctttagcttgtttcttcaataccttttcaacattaggattcttttggtaaagtgttacatcttgaacagtttccgcaaaagtacgagaaatttgtgggtagttaacaataattggtcttgcatgacctgattgttcattttgttcaattaagaatttcatcgcactatctgcattcttagaaattctagcaatatttgactttcttgatggaagaacgcctaaagctttatcagtattgtaacttccttctttacttgctaagaagttaactaaggcacctgcagccttcttattcttagcggttgcactcattgcatattgccatgagccagtaggagaaacaagcttcttagtttcaggtgatacagggtatggtaaaacgccccaatcaagtgacttatattgagtcttcaaagattgaatttcccatgcaccagttaaaaacattgggtacttaccagtttcaaatcctttatctttaggactcaaagtagtgtagcccttctttaccaattcttggataaacttaaaggcactagcagtcttggctgaatcaaagtaaccggttgatttagttgatgaactgtttacaatatcaccatttgctgaccatacaaatggagcaaaagcataaattgaccattcagagcgatcatttaagttcatgttaaatggtgtagtgtgtaacttattctttaatctcttacaaatacttaagaattgatcccaagtccaaggtttgtttaaagttggtaattctgaatcagaaatgccggctttcttaaataacttcttgttgtagtaaattccgacagatgattcttgatagccaactgcataaagtttacctttataagtaccttgtttaacaatacttggtaataagtctgatttattagtaatgtacttatcaattggttgaataatctttgaatgtgcatatgcagcagtatttggaccatctaaagttaaaacatctggcaatgaacctgaattaacagctgcattaatcttatcttcatagccaccaccagagctagaacgtggaataaattctacttttgccttataaccatgtttgttagtcttattaaaaatagaaatattcttagataaagcctttccttctgggtcatctttagaaacgtggacccacatagtaactgtattcagattttgggctttttgacttgaacacccagcaagtgataacccagccatgcaggctatagctgcaagacctgttttccaaaacttcttcatttttgtatctcctgtttcattttaaaattgaaacgtttcatttacaattcaaataataacagcgtgtgtaagcgctgtcaaatattttttgtggtattaccttcaatatagcttactgggaaacgctcaatcctttgttcatccctatgttgctctactttttcgataaccatttctactgcgcattttgccatttctgggagtggctgtctaattgtcgaaatccctaattcagaattaaaatctggctttatcccatcatagccaattaactgaatttgctctggtacggaaatctctcgttgcgctaaccaatttttaacatctagtaacaaactatcagtattacagaaaatcccatcaacttcaggatttttatctagcaacttaaatagctctgtttcttcctcttcttttgtcactggttctagcaaataaacatctgcaaattcatatccttgttctgacaaatattctgcaaaacccttatgacgtttcattacatcactaggattatggttataagtaccaataaaggctgggtgtttcactccatgtttcagcaattcttcagcagctaatctgccaccttcataattttccgaagtaacataagaaattttttgttcaaaatatcgatcaattgataccaagggaataccagcatagaaatatttatccaaatcatcatatgtgatgcaaataatggcatcaatcttgttttgtttagccattttaatataatgctgttctgccttaggattattagaataattgcaaagtagcaatttataatttttttctgctaaatatttttctacataataagcaaattccgcaaaaaacaagttccaaattgaaggtaaaataagcgccacagtctttgaagatttaacttttaagcctcttgcatattcatctggaacatagtttagctttttgatagctgcattaactttatcaattgtcttttgcttaacaccaggagcgtgattaataactcttgaaactgaccccaaagcaacaccagcttcgcgtgcaacatctttcatagtagccataaataccatctccctttttacagataaatttaatacttaacagtttattatactatgcaaataaataatattcacaaactaagccaaaagaaaaaagatatccaaatggatatcttttacacaatatcatctttcttagctactaaggctaacttccagccagtagtaaagtgattttctcgcaggtgtctaatagcgtcataatcactttctaagctatcaattgcatcttgcagccttttattttcttttctaatcgcatttaattctgggtcattcacgacccctttcaaatgcacttgtcctgctaaataacggcgacgatgttcgaattcttcttttaaagttcttaaactagcatcatagcgaactaattttttattcaaatcttcaacctgcttatttaacttcacaaataagtcataaggcatatctgatttgatgcgattgcattcactacatgacaaaattaaattatctaagtcgttattatgtgacaaagatactggatctttatgatccacgctacggccagggcgaccacaatattggcaaatatatttatattttgcacgaattctttcacgattaatataatcaacttcgttaagttgaaaattaacctttaagccgagccccgcaagatttttactaaattcagtccctccttggggaataaaatcaagtttgccgtcttcacttttaatgatagcttgatttaattcgctacggtctatttgaccactggctacttcattactatcgaagtcttgcataaaggcttcataggattttctctgcttttgacctttaacaataaagttatgttcgcctgtgcctgctttaccacgatagccatacaagagagcttgtgcaaaagttgcaattacatcatttgcataatcttcagcagataatcctcgctcaagacaaatatcacaaatactccgtaatttaggattgattaaccctttttctttgaaatgaaaagaagctaatcttagtccacaactttcacactgaagcctcactagttttcctccaccaaaatgctaaaggcgattttttgcatctttactgcaccagcaaaatcacccttaaataaatctggcaaaatctttttgatgaagtatttaacacatgctaaatcgtcaaattcttttattgtttctaagctttctttgaacatctgcatataaactggattaggattccctaactcaatttctccatatgcttcatacattaaatctagcttatcacaaactgataagatttttccctctaaagtatcatcttttgcttcacttagacgtttgcggtagatttcttgaaattctgctggaatttcatgtttgatgaattcattagtcatggcttcttcaacatcgccaactaatttacgcatttgtggtgttgcgtatttaactggggtcttaatatccccaatgaaacgttcagtatagtcatggtttaaactcttttcgtaaagggccttccaattaacttcttgatcaccatatacttcttcaatatctcccatcatttgggcaaattcagctgttctaaagcagtgtgctgcaactgaatgatgttgatatttaaagtaacctggcgctctgtcaattgactccaaacttgataacccttgtaaatatgcgtgtaaacccattatttattttcctcccttacttaaatttgactaaaaatttttactatcataccaaataaaaaaattaaatgcaaatgtaaaagttataagttataaaaaaagactactagaacaaatatcctagtagtctttattgaaatcttacttgttttcgtccttagcagccttgttaaggtattctacaactgctgctgcgtgagcaacacgcttctttgagttagcagcgttacgaggacgacggtgtgggttaatcccagtgtgaatgtttcttgacatgtctattcttcctttcagattttcgaaaatctacgtaattttaacatatataggacttaaatttcaagtttacttaaaatagcctatttagataatctttaacttgctcacgaaccttagtactggttaaaaaattagctactaaaatgatgataataccaactaaaaggaagattgccaaattcataattaccctcgattccgctaagtatctatattttcattgtagcccctatactaaaatcagagcaattaatataactttagtaaaatgcttgtaacactctattcagaacaattaacaagtcttgccatttttcatttcttcggcagttaattcatgtggcgtatattcacgtacagcaacagctccatcaatcacaccactgttatcatataagcttataacggcgttacgtgcatttaaaagtaagccatctgttaaaaatgctaattcattatctgaagtatacatttccaatccagcattattttccataactactggatattctggatctttttgatcagttacaattaattggaaatctgccccaattgtacaagtaccacctaaagttgaatatttatttgaaccatcatctaatgtcaaaataacaacttgaccaagttttacatgcttttttattaattcttgtgcttcatctttaatattgatttgaacagttttattagtcataagtaaatcctcctattactcactaactatatctctttctttgttatctataatgaaccttttaacaccttaaattcaatttttttgcttattattaggaaataaattgctcaaagatattgcacacttaacaaaaaaggctcacaataaaacttggtgatttttaggcgattagcatgagggggaccacagatgaccgtcttgaaaaatatttttaaggatcgcatattccaaatttctctagtgattacaatcattagcttattttttgcgcgcccaagaataagtgatatcaattttcacacactttattctgttactgcaatgctttgtttaattcaaatctatgcttacttacatgttttggatattttagcatataaattaactagcttggctgataatactcgcaaattaactttgcttttcacattattatcggtgctttcgggtatgttcttaggtaatgacattacggtcttaaccctcattcccctctatttaaatgttgcaaaaaagtatcaactacctcaaatttacccaactaccttgattggtatgggagcaaatattggtgctgctttcactccttggggtaatccacacaatatttttattgtcagcaattataatgtacctgctaatgtcttttttgcatggtcaacaccttatttaattgtttctttagtaattttaatagcaacttgctttttcttacctaaagaccatattcctgttaatcaaactgaaaatattcatgttaactggagaatgacaattttaactacagctgtctttatctttttctttttcggtgtattttcaattgtgccaatctactatccaatgattgcagctttgttattagctctgttaattaatccaaggatttatcttaagattgactacgctcttttattaactttcactttattctttatttttattagtgatattcaacaaatcccattgattgttggattgattcatatgactgtatattctgaaggatctacttatttaacttcaattatttcaagccaattcattagtaatgtgccttcaactatcttagttggaaagtttattaattttgccaaggcattactactaggctctaatatcggtggctttggttctgttgttggatctatggctaatatgttagttttaaaaacattcaatcaacattctagtgcaagtaaaagaaagttcttcaaacactggactattttacaattttcaggtttgataattttaacaattgttggttggttaataatttatttcaatatttaacttaaagaagacttaattgtcttcttttttcttgtaaaaaaaatcctattctatacaattatcttaaggattaaattagtttaaggagatataattatgactatttggattattttagcaattgttgttgttttggcaattatttacattaccacttacaacagcttacaaaatgccaaagtatatactgaagaatcatggagtcaaattgacgttcaattaaaacggagaaatgatttgattcccaacttagtagaaactgttaaaggttatgctactcatgaaaaagaaactttgagccaaatcgttgaattaagaaatcaattaactcaagttccagcagatgaccacgaagaaaagatgaaagtttcaaaccaaattactgattctttaaagagtatctttgctttacgtgaagcttacccagatttaaaagctaatcaagaatttggtaagttaatggaagaacttactaatactgaaaataaaattgcatattctcgccaactttataactcaagtgcagctctttatgatcgtaagcttttaaccttcccttcaaatattgtggctggtattcaccacttcaccaaggttgaatacttagtaactccagaagctgaaaaggaagctccaaaagtttcatttaaggactagcctatgctatttgagcaaatttcaagaaataaacgtagaactgctctgattctaacaatttttgttttaattttagctttagttggcgcagctgttggctactttgtcgctgatagcatgatagctggaataattattgctgtaattggaacaggtatctatttggcaattgttttgcatgatcctgcccaattagttatgagcatgaataatgctgaagaaattcacgagcaagataatcctgaactttggcatatcgttgaagatatggcaatggttgctcgagttccaatgcctcgggtctacattatcgacgatgctagccctaacgcctttgcgacaggtcgagaccctgaacatgctagtgttgctgtaacacgcggattacttgaaatgatgaaccgggaagagcttgaaggggtactaggtcacgaactttctcacgtccgcaattatgatattttagtatcaactattgcgattgcaatgctaacagttattacactattaactgactttacttcgcgttacttattctggtttggtggtagcagacgagatagagatgacgatgataatgacaacaagaacttagaaatcattaaaatcgtactcttcgtaatcacaattttgttagcacctttggctgctactttgattaatttagctctttcaagaaaccgggaatacttagctgatgccggaagtgttgaattaaccagaaatcctcatggcttaatttcagctttaaaaaagattgaaaatagtcagccaatggaaaatgtgagttctagtagccgggccctttatattgaagatccggtaaagaaagaacacagcagtttatttgacactcacccacctacaagtgaacgaattaagcgacttgaacagatgtaaaaaagagaatcctaacggattctctttttgtgttgctgatattaactcacacccaaggcaaatttagcgtaatctgacatccgctctttcgtccacctaggctgtgccctaaattcaacatcgacatttttaacttcaggtatttttactaatacctctttaatcatctttgctaaaacaatttctaaggggcaacctaaaatctctagtgttaattcaactaaacaaataccatcttcatctaagtcaatactatagacaaaacccatattaacaatatcaattcctaattcagggtcaacaacagtcgttagttgcttaataatttcatctttaataacttctggtgctctcattttcttcaccactaagcatctttaccaaaaatcttagccttaattgcttgcccggtaggagttccggctaaacctcctatcccagtttcacgcaaagcagctggcatagacttccctactttatcaagggccatgatacattcatctgctggaattatgcttacacatcctgccaaagctaagtcagccgaaaccaaagcattagctgctccaatagcgttacgtttaacacatggaacttcaaccaaaccagcaatcggatcacaaaccaagcccaacaaattactaattgcaatcgataacgcttcggcgcattgctgcggtgttcctccagctgcttcaactgccgccgctgcccccatcgctgaagcactacctacttctgcttggcagcctccagttgcaccagcaattccagcatgattagcaattactaagccgaatccgccggctgtaaataaaaatcgcaccaacgcatcttcatctaaattaagccttttttctaaagaagcaattacccctggcaaagtaccagatgaaccagctgttggggttgcacaaataatccctaaagcggcatttacttcattagttgccatcgctgcttgcacagctcccatcatagtatccccggacaaggtcttatgggtttggcgatatttagccacttttacggcttcaccaccagttaagccagttgaagatattacacccttaccagattcacctcttttgacggctttttgcatggtttgaagattgaattgcatcttcttccatatttctgctcgcgataaacctgaagttttgatttcatcttcaattattaattcagaaattgcctttcctgttttgttagctgtatcaacaatttctttaacactatcgaacataatttttcctactttaaatagattatccctttaaatttttcttgcattaaagctaaagtatcaggtgctagatatttttcaatatcaaattcatataattcaccattagctactggccatttttgtaatttttgtaaacctgcttcttgatctaataattcatttaattgactaactaaaggattatttttttcatttgattgatataaaaccatcggtagtggtccagttaagttcattttacagccttgtaactcgattaagcgaatttcaattgttccaccaccaattgagcatcccccaactgtaatttgcttttcaccatctgataaatcaataattgcagtattagggtgattaattggacttggtccttcttcttcaacaaaacgcaacttaattcctgctttagcaaccatttctggtgctttaggaatccgctcatcatctggtgccatccctaacagtccacctgcaattgcaaaatcagttccatgcccacggtgcgtttttgcaaaagattcataataatgaactactacttttttaggagttttttgaaaaattaagcgcgcagcatttccaattgcaactgccccagctgtgtgcgagcttgaaggtcctaccataaccggcccaataatatcaaaaacactgcgatagttagccataacttttctcctttagacgctttactactttaagtgtaaatatatttaagcaaaaaatgaagtaatataggaaatttataacttttatattacaaccaagaaaaaccatattccgaaatctaatcgaaatatggttttttctttttcattattgttgactactatttttgaactagtaaacagcactaaaaggcgcctccaccacttccaccaccaaagccaccagatgaaccacttgaaaacccgcctgatgaacctgtatcagaactaatacttgagcctgcattaaaagcagaagtaaaactatgttcaaaattattgctactactattagttaaatatagagtttgataaacaactaaatcactagttgctaattcactctcgctaaattccaatcggagttgttttaaaaccttctcagatagacctaatgctactgcataaggcataatatcttcccaaagaataagctcgccaatatctctcattttaaaattaccaatattttcaagcatcttcttaaaactacgtacttggtttgtaatctcggcacctttttctgtataaatgcttaaccgactagcagctaccaaccacgaaataccatttaaaattgctaaactaattgctaatactaataattgccatgaaattatacttaacatacatgataagaaaataattattgcattaataacaaccaatattccagctaaagctactatattttgcttcttttctcggattttatttgagaaataatttctttgataagcttgcttgtaatattgatttctccaagcttgatacttctcacttaattctttaggatcatcaaatttctttaattcatatgtagaaaaacttgcaccgtttcctacttcatcaaataaaaatcttaatagtggttgctgacttaaagcagtttgatccttcaaaaaaattcgatagctcgacttttttataatcttgccaactttttcttctctaatttctaacttatgctttccggtcaattcagtaattaaagccatcaatgcttgagtatctggcttggaagtcttatcaagaatttgagctataataggacttacttcaggaatttcataactatgagccaaggcagacattttcttaggttttgatccttgtttctttacgaataaactgacaattatcgccaaaatagaaacaatgatgctaaaaattaaaatatatcccgctctttttcttctttggttagcttcttctgcaagttgtttttcttgttttaaaataaattgcttacgcttttcatttgaaacatttttattatctgtagtaacacttgttggaaaaattgcatggacctcaattccagtatctccagctacattgtcagcagtcataatgattcgtcccttatctggcaatacttgaatatgacctgatatgtcaccatgggcccaagcttttaatatcggtaccttacttggaaatataacctcagcttcaacatgatctaaatcagtttcccaaccattaccaataattttaaaattaagctcagctgtatcctgccaattttttatagcatttgttatcttgtaacgatatacaatggtaaaacgattacctgcttttactttgtgaaatactttaaattgatagccatttttataactaagttgataggtatcattacttccactggaattattaattattgcctttgttacaccttgattgattatttctacttgaggattaagcaacttttgattttttaacaaattctgccgataataaacaccacgagcagaactatcaaacttataagtaatctttcgttcaattgttaaattgccatcagcttgaatatgacttgctacttttacattagtaatatcataactaggactatccgctaatactctttgtcccgttacagaaaacaaaagcgttataacacccaacatcaataaaagattgataatttttttcattcttacaccttattagccctatttcaagttaatattcgcctgtctaaataattcttctctcatcaatgctggagtagtaccataatactcactaaactttttatagaaaaaagacttacttgaataccctactcgactaataatttcttttaatgataaattgggctgcgccaataattctcgtgcttcttgcattcttctttcatcaacatgttcaacaaaacttttaccagtcttttgtttaactaaattggagaaataattttgattaaatccaaaatattccgctgcttccgctaatttaacatctgcaaaatgtaagtcgatatacctatcaaggtcactaccgataaaattagctttcttactctttccagtagcttgactaaatacttgcgttctaagtgataaagcaagtaattgactaaaagttccagccatcatcgatgccataaataaatcaccatttaaatattcattaatggcattttcaatcaattgactctgcttcattaacctacttgtcttaataaaaagatatcctttttcagctaacaggctctttacagttactaaaatttcattttctttattatcaagactcatataattctgaagttctttttcaaaatcataaatggctttaacacgcattttaacgactactgtttcagaagtttgttctttaatttcaaatgcttgacccgccttaattagaaccaaattcccagctgacaaatcaagtatttgattacgtaatttaatagaacaagttccattttctacaaaaagccattcttcttgtgaatgatagcggtgaataccgccattatgattttcaacataaatggcaaaatctttctgatttttatttttggagtctaactttaagtcattagtactctgtttagtattttttatgacccctcttaagtattggtctaatgtaaaaattgccacttaaatcaccgccttaatatgattatacaattaataactttttatttgctgattgtacgcttttctttttgacgggcgtaatagccaataataaatgaaccaacaattaatgttgttgctacaatcataatattatgaattccactataaagaatctgcctcatttgtggcaacaacgcttgtggcaaagacttactagtttcagcatctgataagtgattaagcatattgatagttatactaccaccactttctcttactcctctaaaaagtgctgcattcataattaacccaaaaacactagcagcaacagcagaagcaatcattctaattaaaaatgaaaatgaagttgctactggaacatctttcttctcaacatcttgttgaaccttaacttgtaattcattaaagacaattccattaccaacaccttgaaacatccctgctaaaataattaagaaataaggcattgtaataggtccaaacatcattaagaaataacctattagcagtgatccaatcccaattaataccacttgacctgctgaccaatgttctcgcattttagcaactgacaaagaagcgcataaatcagtaaatgcacccggaatttgtgtggctccaccaataaatgcactggtagctagtaatccttgagcccacatcggtgcataaacactaaatgccatcattgctgcccaaattaaaacaaacaaagcaaaatcaatatttaaatctgaatttttaaataaatgtcctggaataactggatcttcagctcttttttcaataatgattaacattccaaagaaaattaaagctgccgcaaataagaccaatagggtacccaactgagtctcaccaattaaatcgacacctatcaacataataattaggcctaaagttagggtaagtgccccacccaaatccacttttttctttggtctttcaattttttcatcgataaagtaaatctgcacaagaataattgatatcaaagctactggaatatttaaataaaatacccagcgccatgatagagtatcaactatccagccacctagcattggacccataatagtagctgaagaataaaaggcactaactagccctaacgtcctcattctcttagcgggatttggatataaatcagaataaataatataaggaattgaaaccattcccccattacctaatccacacagtaaacgtgccaatagtaagataaacatattaggagccattccttgaaataatgctcctaataaaaatgttaatgccgctaattggtaggctattttattactagttcgttcacccaacttactccaaagtggggttgcaacggctgttcctagcaaaaatacactaaccatccagcccatatattcgattcctttaagatctgcaataattcgaggcagagcggtattaataatagtattgtctagtcctgacattgcattagataatagcaaagccatggtgacaataattgttcttttcttgtccatactaactctcttttcaacttgttttaattaactatacaacgtctaaaagcaattgaatagacaatgacagcgtttttatatataatcaagacgtttaggggtgccgttaggctgagatgatacccattgaacctggtctaggtaatgctagtgaagggaaaatgacttgtgattactaatgccacctcaaggaaggtggtttttattttgcaaacaatttctatatcaaatttaaacttcgcttatgatgagcaagtaattatcaaggacctatctgcgaattttactcctggcaaactccatctcttaatcggtgaaaatggagctggtaaatcaacgctacttaaaattatagctggcttattacctaaatttggtggaaagcttagtggcaatatcacaactaatttaaaaaccagcatgatgtttcaagatcctgaacttcaatttgctctacctacagcttatgatgagttgatttttacattggaaaatatcggtgtttcacgtgaaacttataaaaataaaatcacagaatcagctcaatttactggtatcactccgttacttaaacgcccactaaatcagctttcaggcggcgaaaagcaaaaagttgctttagctattttattagcaatggacagtgatttgcttttacttgatgagccttttgcaagttgtgacttagctagtagaaaaagtatcttacttaaactaaaccaattagttaaagctggtaaaactgtgattattgttgaccacgatttaccagattatgaaactctagcagacgaaatttggctatttgaaaacaagcagctccatcacttaactagtaatgaaagagctagtttatttcatcatttaaagcagcccattaatactaattttgtcttgcctgaagagcaaaattcactctttactttttccaataccgttattaaacacaagcttcctttaattgaagtatcgaatcaagctatctatcaaggaaaaatcaccttacttacaggagaaaatggagcaggcaaaactaccttatttaagactttaactaaaatgcatccctacactggaaacttaacttaccaaacaaaagaagttaaaaaatggcgcttaaagcattatttgtcacatgttgctcaagtttttcaagaaactaacaatcagttcttagaaatcactgtcaaagaagagctggctttaagtcaaaaaacacaagtaaatccttattttaccccagaaaaattaaccgagattttagacacattaggattaagcaagttattaaatcatagcgtctataccctatctggtggtcaaaaaaagaagctgcaaattctattaatgctcttaagtaatcatgatgtcttgctcttagatgaacctcttgctgggcttgattcttcttcgcggacaataattattaatttactggctgaggtgcaaaaacaaacaaaacaaacctttgtaattattagtcaccaaatttctgaatttgcaccaatttgtgattaccatttagttttagctaaaaaagatttaacttatatccaaaatggaggtgaaagtcttgaatcctagttttaaattcttacttttattaattattgcgctagttatatcagcaactaactcagttgaattaaacttaattgttatcttcgcttgctttatctatttagtaaagtatcgcttgaagttaagccaatttttcaagctattactttatcctgctttagctgcgatttccgttttcgttacggttgggtactttagtaaaagctccatctatgatgccactagcttagctagcagaatttatgtctatgtctttaccggagcagctttaactttaacaaccgatatgactactcttgccagatcatttgaacaaaatctccacctacctgctaaatttgcttacggctttttggctgcagttaatattttgcctaagatgaaacgccaaattaggcaaattagatatgctggtttgatgaggcaaactccactttcacttttttcaccaagactttatttcaaggcgctacttgctgctttagctaattcagagatgcttgctcaagcaatggtatctcatggctttagtgaagataaaaaaagaagcgtcttgcaagttgtgcaagtccgcttcagtgattacctctggtttggagggattttatttatttttagtgttttagtgatatttagttgttttctttcaagatagcttttatctcttcatctgaaagagaaacatctttgtttgcttttatccatgctaaactttcagccactgtcgctagcttacttcaaattctgatgaattattttgcgaatttcaccatcactaaggctgaagtctgagtcaaccgaatctttgattgcggaatatacttctgcttcacttatttcaggttgagtacgtttaaaaaatgttacgaaagcttttaccgtattctgatcttttcttcgtgcttcttgcttggttcctaattcaataccacgtttttctgctactgcagtctcttctttcattcgtagttctgctgttctcataagatttctcctttttggatcatcattatactcttgaatttttgtctgaatatctttaaaaactcctgttgactctattttatcatcgttcatcaacttttggagatttaacaaattggcgtcgtagcttccgctacctttagaattgataataatattttccgcattattttgcagctgaatgctcttatcttcatcgtcgtacaagtgaaaactataccgtagcttgaataatcgccttacaaaaacgtttattttgcataatactgccaaagatctcatcatttgtgaagccatagaatttgttatcatctagcatctcttttcctcctaatttttgcgtacaatataaaatacgaaaaaacagaggattttattcaggaaaatcaaaaaagcgatgagattattctcaaccgctatttttggctctataatttttctgttgatagtttatttaagctttaactaattctactacttgagtaaatttagccttttctttttcagaaactttatgggcaacttcgattactgtacctgggaaatcttctaaaatagtttgatgaatcttttcagatagttcttgatctaaagcactagtagcttcatcagcaatcaaaattggacgatcagctataattgcccgagcaatttcaacccgttgattttgaccaccagacaggttcttcccatttttgccaacttggtaatctaaccctttatctgcaactagctcttttaatcccgctttagtaattgcattgtctaaaatttcagcagaaacttttcttcctaaagttatgttaaagcctaaagtatcatctaaaattattggtttttgattaataaagctaaagtactggtgcaattgactccaattaccattttcttctttaccattaaacagataatcaccagtagttaacttataattaccagttatcacatttaataaagtcgatttcccccaacccgatggcgcatcaagtaaaattttttcacctgatttaacatctaaatttacgttagagaaaatttgcttatcattaattttaattgcagcattttggatttttaagttagtgaatttatttgtagctgattctatagattccttagtaagttccggaattgctaaaaatttattccaaattggatttgttgacttaacattattaatatcaccaaaaataccaacaataggattaataaagttatttgctaattgggcaatcatcatgatagtacccaatgttatctgcccattaactaccaaatataccccaatcgcaaaaggtaataacattgaacaaataaatgctaaagtcatagttaattcattagcaatctgtttaacactattggtctttctaagagctaattccatgtttttagctgctttatacaagcgatgcatcaatgaaggttcaacatcataaagctgagacatgggtgcgatagtcaaagaatcatctactgtattagtatattttcgattttctttttcccagacatcggaacttttttcaatcattggtccaaagatattctgtaataatgctggagcaaaggcagcaaataagaataccaatgataaaatccatgaccctaataaagctgaaacaaaagctgaaataaattgaatggcattcatgataatatctagttgtgcttcaatgcgattagtttcaagttgctttaagtcattagtcatgaacgatacatcaatttcagaattagaatttctattaacaagtaagtattttgctgctttagccttaatatttaaattaatctcagtcacaatattggcatacagcaattgatatagcactcccgctattcccaataaaactaatactccaaaagcaacaagtacaatatttagcaaactacccttgggtttattagcataatcaataaacagtttaaaagtataagcaacaaataccatttcaaacgacttaattattgccaagattaagtacataaatagtttgaaaggatgagcatattttagggtcatagttgtacctccaaagttatctgtattcaatatattttacttagtttcttatatttgcttaattgctacctatttcttacataccaattatgataaagtcgcatcccaccagctaaaataaaccaaaatcccagcttaaaaagcgtaactgccaaagcctgattaaaataactcccagctaaaatccaatcaagtaaatcactaacaggaaaaacttctgctactacccttagccaagttggatactgactcacaggaataatcactccagctacaagtaccaaactagcaattgcaatattagttagccaatatggattttctttttgatctcccgcaagcgcacaaatataagctaacaaactagcaaaaacaatcataattaaaaatgcactagtcaattttcctgcgtaagctaacatccccatactagttaaagcaatcaaagccaataccaacaattccaacgctgcagctacactagctatcataatcttgggtaaccaatattggctaaacttgggcttaatggaaataatttcttcactagtaccaacattttggtcataacaatatgaaccggtaataattcctaccatcgtaattatcgccgttgtagcaagacttccaattaacactcgacgaaaatcttgaccagtatcataaataattagtaaaaacataacaagggacacaactggcaaaatcaaataattaacaataatggttcgtaaattttcaaaatcaccaattgttgaaaaagtaactttataattttccattagaatacccccaatctattttctttgaaggctcgtttaataacgaatttggttagtattttggagatatagacaaaaaatatagttactaaaagataagtaagaataagttctaaatttattttttcttgataaattagcttaattggcaaagtcaacggacttagcatttgcactggtttcaaatatggcaaggcaaaacttggaattgttaacaaacctgataaaagtaagatgggagttaagactaattcttcatatgccattgcatttcgagttaagatgaaaagtaaactaataaaataactcaaaactgttgcagtcaaccataagattacaatccctagcccaagctgccagtctaaattagctactggaatccctaatactatggccaaaactccagctaaaggaaaagcaactaagccataaattgctgctggcgacagcgttgcaagtaaaactagctcgcggctaattcctgaatttaataaatacggtaaagttccttgccatctttgataagctagagcaccggcactagttgtacaagaagcccaggttcccataattccagcaattaaccattcctgcccagtataagtttgattcacataatgggctaaatactgatatagctccattgtggctgtagttgtaattaccaacataacaaaataactatttttaacatacagtttaagctggaatttaactaagttaatgaagcgtagcatctttatagccccctcttcaacttaggtgcaattgctaagtaggctttttctaagctagtgttagcatcaactccagcaaattctttaatctgatcattattaccactaaagactagttttcccccaccaattaaatgaattgtatctgctaaagtttcaatatctgccatatcatgactagttaaaataattccatgacctgcttcttttaagtttttaatcagctctctaaccgtataaacagattccacatctaaaccagcagttggctcatctaacattagaatttcaggtttattaactaatccgcgagcaatatgcaatctttgcatcatccctttagaaaaagagccaacatacttatctttaacatcaagtaagttaacaatttctaaggcattcaagacattatttttaatgtctttttctttaacgttaagtagccttgcaaaaaaggctagattatcataggcagaagctgagttataaaaccctcgatctccaccaaagacaactcccatcttttggcgtgcctctcgaggtttttgtgctaaatttaagcccatgatttcaatcttgccactagtaggaactaaataacctgaaatagacctaattagggtcgttttccccgctccattgccaccgacaaaagaaatcacctcacctttatgaaggataaagctaattccatcaacagctttgaagattgttttattctttcctttgaagtagcgtttaatattttgtacagctaaaagttcattcattattttccactctctatccctgttactctttgtttatttaatgttttaaaagcttttttcgaaccgcgatttaaatcacgattaaacttataatcttgataatctttgataaacaataaatccaaattataaccttcaggatataagtctttggcttgtcgcaataatttcactcgtttcagcggtacagttacaaattctttatctacaaaaacctcaatttcatccttaaactgaattttttgataaaaaataccttctttctttaaattacttaaataaacaatatctcccttggctaatgaagcattatgatatttacttttagttttttcatgaaaaataattttacttgcttttaaaggatatttaccagtttgtaatatttttttagcttctgtgattacttttttattaattcctactttttcagctatccagagagcacgtgaatcgccaacttcattcattttcaaacgatatgtaggttgtaaagttgtcaaatcaaaatccattgatgcagttataaagttagcttgcttatttgcataatcctttattgcgctatagtgagcagtagcaataactatactgccagaattaattaattcacttaaactagcgattgctatcgcagctccttcattaggatcggttcccgaaccaatttcatcaagtaggattacgctcctttttcctgctttttgcaaaatcttacttaaagttgtcatttcggcagaaaaagtagataaagaattatctaaattttgatgatctccaatactaataaatatatctttaacaattggaatattgcatggcttactacttggtaaaaataaaccaatttctgtcatcaagatacttaatccaactgtttttaaactgacagtctttccgccagcattaggacctgttatcatcaaacctcttgtctgattagttagacttaatgaaagtggcactggatgttgtatcaaaggatgacgtacttcatgcaaaaccaattcttgcttttcattcaattgtggtcttttcgctgaaaaatcaatcgaaaattgcccccttgctaagatgaagtctatttcattaattattgcgagattagttctaagcgcttgtaaatcttcaaatatcctagctgttaataaacctaaaatttgttcttcaattaatgtgatttgcgcttcaatcgcaagtatttgtgaaaccaaattgctaacttttgctggttcaatataaaaagtttttccattagctgacttacttataacctgacctgcaattttagatttaaagctagcttttacagctattgtccaatgtccctcttttttaaagggaatatagtcttgtaaatactgctcataatttttatttttaagaaaatctgacaagtagttttttactttttcttttaattcacatttttttctacgcagtcttcctaagtcatagcctgcattgtcacttacaatcccatgttcaattttgctataaatttcattttctaacttagttaactctactaaatcactagcaatcaacgctaaattaggcgccaacatttttcttttataaaaatatcgttttatcaataaattgacacgtaagaagtcagcaatcgtttctaattcagttgtatctaaactaattcccttttcaacttttttaagtaagtgctcaatattttcactacctgcaaatggaatatgttcccgcaaatttagcaattttaccgcctcttcagtctgagttaacagagattcaacggctttaatattagttaacggcttgatattcactatgcgctcttttgcttcacttgttctggcaaaactagctaatttattttttacttgatcaaattgtaaatcttgatccatataattctaaatcccttcaattattaaaatacttccttttttgtaaatttttaaaagcaatcatatgacatgtacctctattaaatataatttttaattattataatatctttttcatttttagcaaataaaaaaggaaccgaatgtcaaaattcggttccttttagctttttctacttatgatatggactaccagaattaatcataaatgcccgatatatttgctcagtgagaactaatctcattaactggtggggcatcgtcaattttccaaagctcaataaatcattagctcttttattcacagctggactcgttcctaaactaccaccaatcacaaaggtaatatctgaatgtccataagtacccaaatctgcaatttctttggctaattcttcactagctctctcgcgtcctttaatagccgttacaatcacatattccttatctttaatcttgctaagaatcttttctccttccacttccttaacatgctcttgctcagcttcactcatattttcaggagctttttcatcaggtacttccacaatcttaaacttcacaaatcgactcaatcgttttgcatattctgctataccgtctttaaaatacttttcttttagttttccaacacatactatcttaatattcatgttattaattttaccccagaatctacaactattccacacaagttatccacacctgtggaaatcaaaattctatatattgtacttttttcttagcatctactactaatagtgggaactaactttctgaaaaaattttttatactttttttgatatttttcctgtgtatatctacatttacaaactttttatatattttgttgatatatcagcatttatagctattaaataatattacttctaaattttatccactaattatgcacagcttattcccataaggaaaccgcttttttagatatttatacacaatccacagagttttccacattttcccacaagcttacctcacttatttcttccttgacaaatttaaaaagcgaacttaaattagtttcacattctttttattaagaaaaaactgctaaagtgcttaacaatgcaccttagcagtttttacattattcttaatttgacttaagtgttacatctaaattaacagtcttaccatttctattcacggtaaccgttactttatcgccaatcttatgcttgtataaaatttcatggagtgaaacaacatctgaaacactagtaccatctactttggtaataatatctccactcttcatccctgcagcactagctgcgctattcttagttacactagctacataaataccactctttaaactggttttgattcctaattgttctctataagctgaatttaactcgcttaatgaaataaccttaattcctaattgtggtcgagttacttttccattcttaaccaattgattaataatagttactacttcattagaaggaatggcaaatcccattccttcaactgatgtaccatcggtagattgggacaatttcatagagttaatcccaattacttgtccagcagaatttaccaatgcaccacctgaattacctggattaatagcggcatcagtttgaataactgtctgttggttagaagaagtggtgattgttctacttggtgcagatattatcccttgcgttacagaagaagcatattcactacccataggtgaaccaacagcaattacagtttgtccagtaattaatgacttagaatcaccaaaactagcagtttgtgtaacatattttgcatcaattgatagaactgctaagtcactagtcgaatccttacctactaccttagcagatactgtttttcctgaagctaatactacctgtaccttatcacttccactaattacgtgattattagttacaatatagcctttaccattagactttaaataaattaccccagagccttcagaataagttgtatatttcgtagttgatgaactagatgacgaatctgaatcaccaccgccaaataagtcataaatactacttgatttacgagtagaatttttcttcaaattaattactgaaacaacggctcccttaaccttgttgtaagcactggtcatcgtaccagaatttttagcactatttttagaaatacttgcactagaactggaaatagaagtttgtgcggaactagaatcggcataatttgagtattgttcaagtcccacataagaaactccaccacctaataatcctgccactacaccaacaattgctgcttttgtcaaaagtttattttggcttttatcggcagtacttaaattagatcgagaagcttgattttgtgactggttttggacatttggatttttatcttctgtcatattctcgctctccttatcttcataattaagcatatactctaattttgaatattatatgaatattatttgctgaaaattttaaatttttatcaagtctgtaggaatattgggatcagtatcaatgacttttagctgtggattaaaatctatctcatcccttgctaaattgtttaccagagtatcatgagctaaacgcaaagtattattatgctggctacgatgagttaagaagatatgcttagttttagccgttaaaacgtcctcaaagacttcgctagcttgttcatttgatagatgtccataatctgacataattcgcttttttaattgccaagaatatgacccatttcttaacaattcagtatcataattaaattccaacatataagcatcactatctttgataacatcacgtactttttctgaaacataacctgtatctgttaaaaaggtaatacgcttaccagcacttgaaaagacataatattgaggttgtgctgcatcatgactagttgcaaatgcttgaatttccaagtcatcaaaactttttacttgtcctggttcaatagtattgatttgctctactggtaatttacccactttattttcatcaattaaatacttccaagtcccactattagcaaaggcatttatctgtggatatctccgcatcaaaacgcctaatcctttagaatgatcactatggtcatgacttaaaaaagccatatcaatatcgttaatatctactcctacttgtgcaagtaaatctttaattttctttccagataaaccagcatccatcaaaattttatgtttttcagtttcaatcaaacttgtgttaccagttgatccactagctaaaatagaaactttcacattaatccccttagtctgttacatactactttgtattacttgcccagtgaaggcattaacccgcttaattgaacttgtttttgttgtcttattttcaatttcaacaacccaagttggcaataaaataatactatttctaacttcagttaacttggaatactctaattttatccaaatcaccttagaattattagtcaattctcgataaatatataaattctgaattgctttccaagatgaaattgtcgactgtaattcacggactgcagataattctcctaagtaaccttgttgataactgacaatttgatgtttttgaactttgataattaattcagccgatgcatcatatacttttccaaatttagaattttgaacaaatacataattactatcgtctgacaactcatctacataaacatattgtttaccaaatggaacatagtgactattatttttgaaagctttaacttgctccaaagctttggtattatcagtacttaaatttacagccctttgcaatacggcataaaaagttttatcagtagaggaatagctagtatttacattacgcaaattttttatatttttgaaataattttgatcactagcagccaaataatagcctgaagctgtatcttctgaaagagagggtaggtcgatattatcagcttttatttcatcactaatattggtcgttgtattcgggtcagaactagttccactaagctgaataggtgtccgccataattcaattccgagaaaaatactaatcgctaagaaaataacaaaaaataaccactcaattctgcgatgatccataatttattcctctctagtaacatttaatcccttagcactgctagtagtactagttcgatatttagctaagttagcattttgccattcagataatgacaaccaatgattatatatcttaatgtagtatgtcggtgttaagtctaccaagctatcgtgagcactatcacgtactaattcaaaaccaatagtcattctttgaatatcacttttagcaatacctttggcctgcaaagttttaattacagtactagttttaggaatttttactgttcttccatcaaatggaacgggaatttgtaagttcgtactattaaatttgattgttatattatccgtactatatctaatttgaatttgtggtccttgcgttttaataaatactggatagccttctatataattggtatacacaactgatgaaccctctgcatcaaaaaagcgcaaatcttgttctactagtcccagtttatgaacataagtcacactatcacttaaacgagtatttggattaggaattgatgacttttggtaattaatataagtgtagttatgataatccttactattagatttgggtacttctaagtgattatataaaccggcagtataagttgtaacattaccggcagtttttgaggaaacaccagaagttcctaataatcgcgaaacaaagtaagaatcacttgggttactaattaagtagctataaacatttaccgttaaatcattcttatatgaaacttcgtagccttcacttaatctaattagtgaaacagctgtcttactttctgatttttgagcatattttagcaatttatcaaaattgccatttttcaatgaaacttcatagattcgatgatttaaatcattacccgcatataatttaaatttcccatctttttgagcaataaaaatacgattaaattcagaatttttatatttagaaacattacttgaaaagattccaaaagttatttgatccggataagttagctgcaagtaagccttattggccaaaaatttctgatagtcttttttggtaataaatattggtttaattctttcaatttttgcattattaaattctttagaaaataccaatggcaagtttttatcagaatcatatagttgatataactgattgttgcgataaccaaatacttcggtaggtaaatatgcatctttaatagatttagaatttttaacgtgtgtagtatctgtatcagttgattgatttaatccactaaacctttgatcacttgttaaaataaaaatccacaaaactattgaagttatgattactaagccagtcgctatatgcaatgctatatcaattgctctatttttagacttcatcccagtcgtcctcctcactcattggttcaaacggcaatgaaatgtaaaacgttgagccttttccttcttgactatcagcccaaattctacctttatgagcttctacgatttccttagcaattgctaaacctaaacctgtacctccttgctcacgtgaacgagctttatcaacacgataaaagcgatcaaaaattttattcaaatcttttttaggaatccctagtccttgatcagaaatgcttaaaataatttgattttgtgattgtgataatcctactgtaatcacaccaccatcaggggaatatttaatggcattgttcatgatattatcaataacctgcatcatttgatcagtatcaatttcaacccataaatcttgatttgtaatttttctcttaattgaatatttcttttcaccctcctgacctttttctgcatcttttttaacaatcatgtcaaagcggttcaaaacgtgactcaagaaatcattaaagttaacccattccaaatccattttggcaacaccacgatccattctcgataatgacaaaagatcattaatcattcgaatcattcgttcagtttcttcttgagtaacttccaaaaattgcggtgctatttcaggatctttccatgcaccatcatttaaggcttcgatataagcacgcaaactagtcagaggggtacgcaattcatgcgaaacattagaaacaaactgccgttgttcattttcatttttttgttgctcagttacatcatgcaagacacatacagctcctgaaacaaagccagtcacccgacgaattaatgagaaactagcgtgtaatatcatttcatctggagttccctcattaacagtaatcatcatttcctgttgattgccaatcaattcttgagcactaacatcatctgccaagcctaaaatttttgttataggtttatttacagcttctttttctttaatatccaaaaagctcaaggccatttgattcaaaatgatgacgtttccgtgacgatcagtcgcaataactccatcagtcatatgggacaaaacactatctaatcttctccgttcactttcagactgttcctgtgagcgttcaactcttatagataaagtattaaaagcttcagctagttgtcctaattcatcattagaataaatctttacttgaccagaataatctccatcagccacttgtaaagcttgcattctcatttcttcaatcggcttagttattgcccgggaaataaataatgccaaaattgcacttaaaatcgaagcggcaaaagaagcggttaagaacatatatgaaatatttctcaaattgtcaaaaaccccttgcatattagcccggacataaatagcacccaaagtagaattagcccctgttccaacagttaatggtgttatttggaccatattgctaccagtgttattactatcaatccaagtaacttgccgtccggtcgacgtaacctgttttattcctacattagtagctctttgtccaacacgacttttatcatttaagttagaaacagctcttataacatctttgttatcgacaacaataatttcactgattgcactattattataattgcttacaatttggcttaactgttcatctgcttttttagtatttttagatagctgcgtagctagagaattagtaataatagtcggtatttgaattgaagtttgaaagctttcaatcgtgctttgctctaattgccgtgtaaaatatgctccaataatttcaattgtagctaaaatcattagcataaagacaacagcaatctttgtattaagtgaattaagaatactttttatttttttcatttttaccataactaaagaaagccactaattagtggctttcgattctattcttcatttggatctttaacataatatcctacaccacgacgtgtaaccaaaatctttggttgaattggattatcttcaattttttctcttagccggtgtacagtaacgtcaacagtccgtacatcaccaaaataatcataaccccaagctgtttgaagtaagtgttctctagtcattacttgacccatgtgtgatgcaagataatgaagcaattcaaattcacgatgagttaattcaattttttgaccatctttttcaacgatgtaggcatctggcataatgactaaattaccaatcgtaatatttttattttcgttttcactttcatcagcttgcttttgaacaatatcacgtcgccgcaagtttgcttttactctagctactaattcacggttagagaatggcttagtaacatagtcatctgcacccatttctaaacccaataccttgtcaatttcagtatctttagctgttaccataataattggcatgtcatgagtttggcgcacttcacgtgcaacttccaaaccatcttttttaggtagcattaaatccaaaatcattaaatctggatctatctcatttactttttttactgcttcttcgccatcataggcggtatcaacttcaaagccttccttggttaagttgaacttaataatatcggaaattggcttttcgtcgtcaacaacaagaattttctttggcatcggaaatgcctccttctatagatactttatattataattgatttttacaattttatccaaaaagtaacttttttcaaaaaaagcttgcattttcttaaacatcttggcataatatacattgcttattaatgacatgggtggttagctcagctggcagagcaacggactcttaatccgtgggtccagggttcgatcccctgaccacccactaacttgaaccagattcttaggaatctggtttttttgtgcaataaaaaagcagattagatttactaatctaccttcttagtcaaaaacattaaaattaaaattgctatcacaatgaatatacccatcatccccaaattaaattggaaatttgcaccttgtgcaactaaaattgataatccaattggtccacctaattgatgcatggtattagttaaaccactagcacttccggcaacttcttgtggtgcatcttcaattcctaaagaagttaacggcgccattattaaaccctggccagctcctgaaagtaccattggaaaagccacactaagccaataaccatattttaaattaagaatagctgttaaaaatagtccaatagtaagtactattgaaccactaattgcaatttgcttgtggctaaatctctcatttaatctaggtaaagtaaatgaagttaaaaatgtaaaaatagtaactggtaaaaatgctaaaccattttcaatggcactaaagccatacttcgcatgcatatattggggtaacaagaaccaatatggtaacatggccatcataaaaaataatctagctagatatcctgctaaacgatttttattagcaaataagcttaaaggtaaaacgggatttgcttgtttcttttcaaagaaaatgaaaataattaacaaaataatcccagtaatcataaagattggattgttattaactgataaagcataaattaagctagttaaccccaatacggaaattaatgctccaacataatcaactttaattgcatgaccatctgattttttaacgtatcgaccagttaagataagaagaattaatgtaaaaggtacattaactaaaaatcctgctcgccacgataaatagcttgttaacgcaccaccaagaactaagccaaaagtagatcctacaccggccatagcgccataatatgaaattgctttggcacgcattttgccttcatattcatccataattaaagctaaggtcgttggtgcaacaattgaactacctatcccttgaatagcgcgagctgcaatgagtaagccactgttattagtcaaaccgataaccaatgacgctagtccaaagatagttagaccaatcataaaaactttttttcgaccaaataagtctaaaagcttacctgacaaaagtaagaaactaccaaaagttaaagtataggcatttgaaacccaagctaaagcagtttcacttaaatttagcgcttgtccgatttcaacagaactcgtaaaaacaattgagttatccattaaaatcaaaaaataagcaaacagcgcaattactaaaaccatcccaaatttatcttttttcatattatctccttttaactattaggggtattaataccaagactttcattttgaccaaattctggattttcaactaattttttaactaaatctgcaatacttgctaaagacacatcatggccaccaaatggttcaccttttttggtcaattcataattaaccggaccttgagtaaaccaacctggacgaataatggtataagttaagccagaattttcaacgatatcagcagcttgtcgatatggcatcaacatcccgttaactcgcaaatttccatttgacccaacactagctggaatttcattatagatacccattgaactaatgaaggcaatccgttttacgcctgtgaacttcatcgcttgtgtaattgcagctgcaagctctggcaaattaccactcaatgccgcaaaaataaaatcttgattggccattgcttgttttaaatcttcaacacttgcagcatccccagcaattgccttttcacgttctggattaacttgaagtttattagcagaacggcaaaataaagtaagttttgcgtcagttttagctaataaagtttgtctaacgtgactaccaacatttccactagcaccgataattaagacatttgtcatgtttatttctcctttaaaattttgatttataaaaagtatattggagaacaaaagaattgaaaattaccacttttgaatgttagtatacgcttataacatactaaaaaaggaagcttagaagatgttgatttcaaatgaattacttgaaaaattagtagcattcaaagaatatggcacgctagctaaagcagctgaaaaattgctagttactcagcccactctcactcgctctatgcaacaacttgaagatgaattaggagttaagttatttaaccgtacagtcaaccgaattagtctgactgcaactggtgaacttgctgcaaagcgggccaagcagctacttgaaaataatgagctctttgttcaaagcatccaaaatttcagtgcgcagacttcaagcctcaatgtttcaagtaccattcctgcacccttaatttggttaaaattgattgctgaaagggacttcaagaattcgccactattattaactgataaagaaatcaaaaataatttgatggcttttcaatcagatattgtgatttcaacaaaagaaatattttcagacaatatctcgtccatttttcttggtaaagaacatttgaaagtcttaattgatgaaaattcaccactagctcagaaaaagagtgtcacttttaaagatttaaaagactgcagttttcttgtatatgaccaaattggtatttggaaaaacatcatcgaaaaaaatattccatcagctaactttatgtatcaatcatctctagaaaacctggatactatcagtagttcaactaattttattgtctttagatctaatctaaccattgagaaaaactaccataattcaaatgatgctaaacgtgttttagtaccaattgaagatgaagcagcctcaattgaatgttacggaaattatctaaactataatgaagaccgcgtaatgccatttattaaagactttattgctaaatggcctaaagaatagaaaaacacttcagaaaacaaaatctgaagtgtttttaaattgaactagtaatttataactccttaatcacgtaattttcttaaacttgcaccaaaaattgactcaattgctgctgggtcacgatgatcaaagaattgactttcttttttatccaaactagcaatcaagttcatctcttcatcgctgagcttaaaatcaaaaacatcaaaattttcagccatgcgattcttatgaactgacttgggaatagtgacaattccgcgctgcaataaccagcgcaagattacttgcccatttttcttgccatatttttcaccaatttcagctaaaacagggttagtgaaaatgtcatgcttaccttccacaaatggagcccaagcttcaacttgaatcttttcatcctggtgatacttaacctctgcatttctttgataccaaggtgaaacttcaatttgattgatagcaggcttaacattactcatcaactcaaggttctttaattgatctggataaaaatttgaaaccccaattgacttaattttgccagctttttgtgcctcttcaagtgcgcgccatgccccgtatgtatcgccatatggttgatgcaataaatataggtccatgtaatctaaccctaacttctttaatgaatcatcaattccttcttgggctttttcataagtaaagtgatcaacccaaagttttgaagtaatgaaaaactcatcgcgattaatatttgaatttttaatagcttgccccactgcttcttcattaccgtaagcagctgcagtatcaaataagcgatatccaacatcgatagcatcacttacagcttgctgtgcttgacttaagtctggtacttgaaaaacaccaaagcctaattgtggcatcttatttccatcatttaaagtaatataatccatgattttacctccgctataattcatttattgattagtagtatatgggcgcaaactaaaaaataaaattatcaatctagcatggatactatgcacagagtgtatactaaagctactagataaggctgaaatcagaatttatacttttttcaaaaaaacacttgccagcctaaccaaattttgatattattatttctgttgtgaaagacaacgggtggttagctcagctggcagagcaacggactcttaatccgtgggtccagggttcgatcccctgaccacccactatatgaaagctgcactgcgagaaggcggtgctttttttatgctttaaggctggatttttttccagtcttttttcttgcatttgtagtgacacggtgttaccatttaaatataaagattaatgacactatgtcactttaataaggagcgatatttatgaaagaatttacaagagaagaattagcacaatttgatggtaagaatagtaacaaggcttatgttgctgttaaaggcgtagtttacgatgttactggtaatgcccactggcaagctggtgaacaccatggtgttttagctggtaaagatgtaactgaagcacttagccactcaccacacggcgactcagttttagcaggtcttgaaaaagttggtactttaaaagactaattagcaaaaaaagactgtcggaaaaccgacagtcttttttgttttatttttcttcttcagcaattgtttctgccgcaattctaccaaaggtgaaaatatcagcaagtgaattaccacctaaacggttacctgcatgtaagccgccggcattttcgccagcactataaagacctttgataatttcgtttttatcatttaaaacgtgagttttagtgtcaattactaatccacccattgtatggtgaatagctggttttcttggagtggcataaaatggagctttttcacacttcagattgaagacgctcttaccaaattcaggatcatgtccagcatcaacatatgagttatattttttaattgaatcaactaaagtagctgggtccattcctgcttttttagctaattcttctaaagtatctgctctatataaagttccagccttaacttgggcatcaattgattcttgagtggtgttataagctgtttctttaatcttgtcatcagcaattaagtagaacaagccaccttctttaatagcagctctagccaaagtatcacgttcagcatactcattaacaaaacgtgcacctttttggttaaccataatatagttttctggtggtgtttgcagacctgtaaacaattcccctgtcactgggtcagaaactggcattagctgaataaaacccattccagttaaggctgctccaacactttgcccaagcttaataccatcaccagtaattgcaggcgaattggttgtagccatatcatcctgaatttctggccaataagtattgtacttttggcacattttagtattggcaccaaaaccaccagctgttaaaactgtagtcttggcatgaactgtaacttttgagcccctatttgaagcgataactccactaaccttgccatcttcaagtaacaacttttcagctttagtttcggtcaagatttggccaccgtgagctttaacccagtctcctaaaacatgaataaaagcataacccattggttcaactggtttgtgcccgcggcgccataacgctccaactggcatagtcacttcatgttcaaacttaacacctaattgttccagccacttaacggaatcaagcacgttattaacaagagtagttactaattcatatttaccatgaatttcacgcccgtttaagtcatgacgcttaccacctaaataagtttgaatttcatgtagtaaacctgaatcaaaaagataatctgccccgctatcaagataggtcttaatttgcttttgaagtttcttaaagtctgcttgatattctgcatcaatcttatcaactggtgtattcatcagttctttcaaagtttctttttcacctggtaaacatttgaaatctttttgccattcaggttctgcagcgttcatcggaccgccggcacgggtagtattaccaccaatttgagggaatttttcgagtacaataactttcttacctaattgtattgaacgagctgctgctgcaagaccggcaccaccagcaccgataatgacaacatcagctgttaattcttgatcgctatttttttcagtagctggcttggcccgctttttccattcttcactatcaccaccagcttcatcaattgcttcagcaactccatcaattacgccatgacttgaaattgttgccccagaaattgcatcaacatttaaagtttggtttttaacaatttggttaggtaaacgatggaatacttcatcagcaacccctttggtttctcctttagcatcaactttgattgcttcgattttttcttcagacaaggttacttccattggcataaaactagaaccatgccctttagcctttactttataagtcccttttttcataagtagtctcctttttaccttgataattttaattctaaaattagcccaagattttgtgaaatatttatctaattaccatgctataataattttgttatagcaaaggaggccattatgcacgatcctgaaactgttttacattatcttgatactttacttgaagaaagtaattttactaaggcagctagagctctatacatttctcagccttatttaacccagacaattaaacgactagaagaaaaactggggattaaattaattaatcgaactgttcctttcacactaactgaagctggaacaatctattataaataccttgaaagttcggttgctagcaaacggaaactccattctcaactaatcaaatacgaaaatccaaaattagaagttattcggatttcagttttagagagtttgggctgttttttgattcctgctattttgcctgactttttaaagagccatcctaatattaaagttcaactttccgaagtttctcctagaaccagtgaaaatttacttttagctgaagaagtggactgttacttaggacaaacgcccaaggcattaagtaagggaatcaagccatatattaatgggaacgaaaaatactatattgtaatcccagctaattctaaattttatcaagccgggaaatttattttagagccggatgcttttgatctgaaaactttgctccagcaaccttttctcctttcaaatggtagttccgccatccgacatcaagtcgatgggctctttcaaaagtataaaattaaaccaaatatcatcttggagagtcaaaatattttaacaacaactggcttagcgattaatggtatgggcttgactatttcatcagcaagtattctaaagagatataaagaaacgccacttaacttattaccaatatctcctgatttactttcaattgactatttcatcgctgttaaacaaggtcgcacactaacacctgggattcaagatttaataactgcctttatgacaagtaacttgagtcctgaaattaagtaaacaaaaaggactatttcccaggaaatagtccttttattttctatcgtttttgctttgtaaagtaaattactaaacctaaaactaggccaataatagctggtaacaaccaactcaccccaacacttgaaagtggtaaagtgttacgtacagtaatcaaactttgaactaagctagtatttctagcaacatctggcaatgcattcacaaagtctaaaaatgctggaattacagtgaagacaacagtagtaaagtagactattcgcgacttcttaataactggtgtcatgattgatagtacaatcaataccattgaaagtgggtataagaacatcaagaatggtgttgaccaagcaatgatttcatttaaaccaacatttgcaattaagaatgaagcaaatgcagataaaaccatccaaacgcggtagctaaaccgtgggaagtacttgtggaagtcttgaccaaaagcagcaactaagccaacagcagtagtcaagcaagttaccgtcatcagagttgccaaaactgcttgtccaacgtagcctgcataatgttgtacaatttgactaaatgcgacaccaccatcagcactcatagtaaacttaccaagtgacatcgcaccaatcaggattaagaagaagtagataaaggcaacggctcccattcccaacataccagaacgtgctgttacaatagcaacactcttatcttcttttttgcccaattgtctaatagctgctacaacagtaaccccaaatgctagtcctgccaaagcatccatcgtattatacccttctaaaaagccatttaaaaaagcattgccacttgtagcataagcactagttgcgtaacccgcattagctgatcctagtggattaatcattgcaacaaaaaaaaccaagaaaagtaagactaaaaagataggatttaagaccttacctaaacgattcaagatatctttttcattatatgaaatccaaaatgcagctccaaaaaataatgcagaataaattaataaagctaattgttgatgatccttaggaacaaaaggtgctaccccaactgtaaatgaaacagttgctgttcttggcgttccaaagaatggcccaatagtagcgtgaatcaaagccatgaaagtcacagcaaatgctgatcctaatgggaggccaatatcataaactccatctgctctagttaaggcaattgccaaaattgacaataatggtaaaactaccccggtaattaaaaaaccaagtgtagcaataaaccaattatgcccggccatttgacctaagtgtaatgggaaaattaagttccccgccccaaagaataatgcaaacaacattgaactaataacgaaatagtcttttttcgttaacttacgttcaacctttttcagttcatccattaattcaccctctttataaattatatttttatttttatatttttatttttacattttatcatatttatctaatgacactattgtattttatatcttgaaatcggaaactgtcaaattttttgtgtaaatagatctttctcgtaaattgtttttttaacgttttatttattcaaaataggattctaaggtatcctggacttgaccaaagcctttgtgaattcggttgaagtagcggtcattgtagctcattgcttggatgccaataaaagtatcaagcgactgttcagtcgggaactccgctttaggcttagccttgcgcttaatgacgttattaaaggattcgatcatgttggtagagtaaattgaagccctgatctgcttaggataattataaaaaacaagcaggtctggctcgatgtctttcaggtttctaatgacacgattgtagctcttgttccatttggcataaaaagcatgcaatacatcaacagcagccgctttattggcttgctggtgaatctgcttgaattcgttcatgattgcctcgcgatcgtccacgcgtactttagcgcagatgttgcgcataacatggaccaagcagcgttggaaatgagcttgaggataggtctttgccagtgctgctttcatgccgacaacgccatctgaaaggaaaagctctacttgctttaaaccacgagatttcatgttctggagcaacgccgtccagacttcaatattctcactaggcgcaatgcagtagtcgataacttccttgtgaccattaggcttgatgccaatggcaatatatactgcttctcgttcaaaagtttctcgacgcaacggtatatacgttgtatcaagataaacacaaaagaacttatcgctcagcttacgcttgtgataagcctcaactttaggaatcatttgcttagagatattagacacttgagctggactataatgactgccatacattttttcgatcaaattagctatttctctagtggttacacctttagaataaagctttataaccatatcttctaagagatcagtatgttgtttatagtctggcagagtgtgttgatgaaacataccattgcgatctcgtggcacttgtacctcaattgatccaaactgggtatcaattttacggaaatacgcaccatttctagaattaccagtattccagccatttctagcatagggatcatatcctaaaaaggcagtcagttcagattctaacatgtcattaacagcttgttggatttcatgacgaagcaaatcattaattttatcttgattgaatagagcttgagttatatttttggtaaaatcattcatgaaggagttcttctttctgtatgttttttttgttcaaaccaatcatacgagaaaggaactcctttttctaatgttttaggaaattaaattaaggaataattcatccttacacaaactattttacggtctcaagttatcaaaatcgttgtcaaaatatgtcataaagtttcaaccccttgtgtctcaatatattagattaattattagcactctcactcatcgagtgctaatctttaatcatctttagtatagcatcttttccacaaggtgcaagataaacgcttaactttttccacatttttttggctcttgtgaataaataaaaaagatggctatttagccatctttttatcttcacaaactatctgctttttctaatcattctccgattctgattatccttttggaggacgtattgcttaatcagttcaactacttgcttattttgtggcaaacttgaatgctgtgcgtcaagtcctgtaactgtcatagccgtaaaatgagcaacttgtttttggaagacatatttcgccgcttccacactattttcaggaactaaaccatctgactcataattttctccaccagaaattgaataaaccgttaagctcttaggaattttagacttatatttaataaagtctgttaacatttgcgttttattttttatattactttcgctaaaattatacggactacctagggtcatcaaaactttaatatttataatacttgaatactcactatagtaatgctctaaccaataagtccaaataaggcctccattggaatgtccaaatgccttaaaattattaaacttgtattgctttgataaggcgttaaaggctatattcagccatttagcttgctttttgatattactatagccatcatgattatttttaaatcccactacaataattggctcctgatcttgtttgctgatggagccagaatatgtcaagcttccatccgtaccaacatttacttttaacaaactatgcttacgatcggttttttgatttagtaatttaactaattgattaaaacgttccgttgttgcactagagccgggcaccataattactggagacacttgagaattatgccgctgagctcgaattttattagctgaattcacccaaattatcgttggaatagctgttgctattaccactattagagcagacaatatccggcaataatctttatttagtcgcattttttgcataagtcttttcattattacctagctcctctttgataatctttttccgtcccttaaagctgattacccggctatcttgcaaagcatcaatttcggcaattcgcttttgcacattcatatttattttataaaacggcatgatgatataaacatccaaaatcactaagataattgtcattagtaatgcttgccatgaaccgttagttccaatatagggaattaatactcctggcgttccagctaagactggataaacgctaaccggaattaaatgtaaggcaattgctaatgaagaaattacaatattaactaatggaataactaagactggcaagactaagagtggattcaaataaactggaaaggcaacccaaaggccgttaaataccccaaacagtgctggaaaaatcgaggcctttgctactaacttattttgcttattacggtctagtaacaaaatcgcaataatcaaactaacagtaaaagctgcacctgacaaagttccatatgattgcactaagtttgaacctaagtatttaaagggcacgttccaactagagccatgagtcaaagcataattaaaattagcagttgctgcaccaccattttgacccgacattgctagttccagtggtgtaccgattcctagccaatgcaaaaaaattgctaataaaactaaaggaacgttaattaacaagttattactagtaataatcttatctgcaattgtagtaacaagatctgaattaaaaattttaacctgtaaaacataaataaaactcgctactacaaccgccataaataaagaagcaacaactggctttaccgccgcaaaagcacgatccttaatatcaaaaacgtgctcaattctttttatagcatgatcttgccctaagaagcgaaatacttgtccaaccaaatatccgataaaaagtgtggtgaacatccttttaatcgacaatagttgcaaatcaacggcgctaaagccattattcatacttaaatttggacttctaatcaaaaagaccgcaataatagccgtaattccggcaagttttgaatctttgttataaattctggcagtataaagggccataaaataggcagcataaacaccaaaaaggccaaaaatagcgaaaattactccaccactaataaagcgagctatttggaaaacaatttgtggaaatactttgctcagatttaagatgttaaaaaataaactatcacgacttaacaagatttttgagaacatttgaaaaaatgccccaattaaagcaaaaggcataatcatagcaaatgttctttgagctgctctgaaaaagacacgctcacgcatccttaaaagaagctttactagtttttgttccatttatatcactcctagattttatacactgtaattttatcattactagtgccataaggcaggttcaaacgattgatgttataataaaaaataaaaggagtggggctttatgacgaaaaagatagaattagaccctgaaactgaacgcttagtatcaacttattgcgaaaagatgcacgtagattttaatactttgactaataaagcattgaaatattatattgttaataagttaagttcaaaagaagttcgtcaggcaaaaagaaaaaatgaaactgacactaaacttatcaatgacttattccaaagcaactatagtccttggatgaatgattaaactgcctttattgacagttttttttatggatttttagaaattgaggtgaaattttggagaaacgaatcgatcctgttaaattacaatatttactcctaggaagtttaatcgcaaatactggcattagctttatttggccattaactacaatatatttgactacttatcttcatgaaagtctaacaatggcagggattgttctctttttaaactctgcttttactttattaggaaatttattaggcggctttttatttgatcgttggcatccctatcaaacaatagctagcggtgtatttattgctgcagcttcttcgcttgccttaatattttggcatggttggcctttttatgcgattttcctactaacactaggaattggaaatggcatccttgttacttcacttaactctatcgctacttttatgaagagccataatcctagttatatttttaattgtctttactttactcaaaatttaggtttggtttttggatcattaattgtgggttttgttttgccgtttggtataacttacctatttattttagcttttttaatgtttacaagttttgaagtaattgtaataacaaaatatcatggcctaaacttagtccatggtcataataatcaaactaaattaaacaaagttgctaaaaatcatatgaataaggctcaattttatcaaattttggcaatattaaattgtgtgttatgtgtttggattgcttatgaacaatggaattctaacatttcaacttatatgctgagtattaatttatcagttcaatcatactctttactatggactttaaatgcacttttaattgtaatttttcaaccatttttaacccactttgatgattttctcacagaacatcttaaagggcggttatatttaggcttcacattatttgctggtgcattcttattattgctgtttgcacgctcatggacaatttttgctatatcaatggccttattaactacaggtgaagttttatgtctaccagctgtttcaacatacgttaatgaccgtgctgatgactcagaaaaaggatattaccaaggaatagtccaatctgttacatcagctggtagagcctttggccctttaattggcgccttaattattgataattcaagttatttaattttatttatcttttgtacatttatcgttataatatctatcattatatttatgttgagtaatcagttaaaactaactcatcaaagacgaaatgaggtttcagatggaacaaactaaacaagatcctgtaaaaattcgatttttacttttaggatcccttatttacaatattgggattagctttatttggccattaaccacaatttatatgcaccaatatctccatcaaactcttacagtagctgctattgttcttcttttatactatggcactactttattaggaaatgctattggtggtgctatttttgataaaatcacaccattcaaaacaattttacttggtgcaataataactagtttttgtgcacttgcaatgtttttaatcccttcatggccattttatccaatttttttagttatttatgggattggtgacggagttgttacaactgcaattaactcaattgcgactacaatgaaaacccatgcttcttcgttcttctttaacttgctatatatgacacgaaacttaggattagtaattggttcattattagttggtatcattacttttttaggtccccaagcttggtttgcatcagcttttactttttttgtagtatttactggattattattacttttcttcagaaagctagatcaggctaatctggtacaggctgcaccaacacctatccaacgaaatttttctagtaaaaagaacttttggactatcattagtcttgttatctgcatgttcttctgctggctcgcatacgaacaatgggattccaacttatcagttcatatgctcaaccacggtatttcgacagctgaatatagtttttgctggacattaaattctgctttaatcacaatttctcaacctatcttgacctatttcgatagttatttaagcaaaaaaatcaatgcaagactctatattggctttaccttatttgcaagttcatttcttattttgattggtgctaataactattcgaattatttattagcaatgttcattcttacttgtggtgaagcattagcttttcctgccgtaagtgcctatgttcacgctcatgcacctaaaaaccaagctggccgttatcaaggcttagttttggctggcacatccgctggtagggctttagcagctttatttggggcaattctattaaatcatatgactatgcctgtattattacttattttggcaagtttaattattatttctttaatcaactttattttattcaatagcttaaaacaaaaggacgcttaatgcgtccttttgtttcattcaaaattatatgaagaaaaaagcccaattccaccaacatcggaaccgggctcacacagtgtttatatactgctaaattgaccacataatctcaatttcgctaccgaagaaatagagaacaatatctagcagtatatatagatattagcatagctagctagctttctcaatgcttgagatataatttaaagtataaattatttatattattaaattatttgttatactaaggttaattattaatatggaaagaagtttttgattatgcgtgttttagtaactggaggagctggatatatcggctctcatactgttaatgctttacttgaagatggaaatgatgttgttgtcttagataatttatatactgggcacagacaagctgttaataaaaaagctaagttttatcatggagatgtattagatactagccttgtaactaatattttaatggatgaaaaaattgatgcagttattcactttgcagcatatttattagtaggtgaatctgttcaagaaccacttaaatattaccacaataatgtttctggtatgattagcttgcttaaagctatgaagactgcaggtgttaagaatttagtattttcttcaagtgctgcaacatatggcattcctaaagatttacctattaaagaaacagctccaactaatccaattaacccatatggtgaaacaaaactcatgatggaaaagattatgcgttggaccgacaaagctgacggcattaaatctattgcagtacgttactttaatgtagctggagctagcttagatgcttcaattggtgaagatcatgcccctgaaacccacttggttccaaatattcttttagctgctaaaaatggtactggtaactttactatttttggtaatgattacaacactcctgatggtactaatgtacgtgattatgttcatgtagtagacttagcccaagctcatgttcttgcattacattacgttgttaagaaccaaaagagcgatgtatttaacttaggtagtgcaaatggattctctaatttagaaattttgcaaagtgctattaaagttactggagaagatattccttatacaatgggtccacgtcgtggcggtgacccagattcacttgtagctgactctaccaaggccagaaccattttaaattggcatcctcaacacgataatattgatgatatcatttccagtgcttggaaatgggttcaaacacatccaaatggcttttctgaataattattacagctttaatactttatataaaaaaggtctaggaaaaatcctagacctttatttttgtagggcaaccatcaattgatccattacactacgtaattcataaaagttacctctaactttatttgtttgtgcaattatgacagtttttgcatctttacttgtccttagaaaagtgtaatacccgttatctccaccattacttccaaaataagtattatgaatataaaaaccaccactataactaatgttagctgaattatccaaattatataaagcttttatactagattttgataaataatttccagccaaaatatatttaacacatttggataaatctttattatccattaataatgaacctgctcctagttcaccatgtatttcatttaaatctaatttttgggtaacaaattttccattcgaactaagttgttgctgtcccaaaacaaaatcaatcttctttaaagtcttattatttgcccaagaaaaggctgtatgtctcaatttgagtttattgataaaacttttagtaattaatttttgataagacatatgatatacatcacttagaatattactcaaaaatacataatttaaagttgaatatgaagctttacctaacattttttcatcaaatttagtattttttattgcatattctagattttttttatcactaataaaaggcttagttcccaatgccttatctatcgttaaaccagatgtcatttgtaataagtttaaaattgtcacttgatttgcacctggcacagttggataaaatttggctaagctatcattaagacttagctttccttcttgaacagctttcattatagctgccccagtaataaatttttggacagagttaattaaataactagtgtcagtcttattagcagttgcataatttaaatatgttttaccatttttaatgactaaaactgatccttcaaatccaacattatcaagagactggcgcactattttttttttgaccctgttgaaggtactactgtcttattacttaatttaacagtttttatactttctactttagttctattttgccaattcctagtaaagaaatagttatcaattctataatttgtattagaatatgacttctgcataaatggcttaacagctttatcaacagcaatccaaccattccaacctaggtgaatagtgtcttgcataaagtatttctttccaccacctttagataaatcagttatattactaaacccttggctagcaagttggtacttaattttcttaactgatttttgatacatcttattagataagtgggtgtactttgcccattttgcgttgattggaggaataatgaataatacatctgtatgttcatgagcaaattgcttaagcattaactcaaagtcagaatattcaacagacttagtataatcaaaatgtttttgacttccctttaacttcttcaattctttttcattaagacgtgtcttgaagaatgtattatcaatcgcaaatttattattagttgtgtgcaagctaccttctgcatcagcaaccttagtcaaaccattaatcgtatatttatctggtaaaagttttgcctgagctttaatcttatttacacgatcaggtaattggaaagtactaaagaatgtatcctcattaactaacattcttctccgtgtttgaagtactagcttttgactctctgatagcggttgtcctgacgcgacagtcatcaaagcatacttaactgtttcactagacttgccacttggcatctgcaaaagacggcgagcagcatatcttgtagctatcgaatctttcgcatctaataaaaagttgattgcttgcaaattagaatagtacaagctaaatgcatttttatcctgcccttttttggtaaaccattgtggtgaaataatcacaacagcctttttatttgttaattgcgatttaatgccttgcattccataaaaatgggctaaagactgacttcccgcgccaccaagtaagaatggagtatagtttctattatatttatacgccaacacactagggtgcaatgaatccattcgtgataattcactggagccaaaaaatggaacatacttacctgccaaggcttcttgcttcattctttgccctttgaaaatacggtcagattgcgaagtagctgcttcaaaaatactatttgcactataagttctatcccaagggaagagcaatactgcaattaatagtaataccgcacagatgacagggccaaagatttgccacagtcttcttctattactcattttctaaactttctacctttgccacaatcttgtttggagtatcccattcttcacggttaaattctgatactggaacttgaataccagtttcttcttgtaagttcaaaagcatttgaactgttgctaatgaatcaagcaaaccattttcaaagatattttcatccatttggtcacttaaatcttcaccagttaaatcttctaaaacgtttaaaacaacttcttttgtatccataattaaatctatccctttctagttacttcctaatggtgcattggatggaaccataaggtgtctaaaaatcctgagaaaatcaagaaactaaaacaaataacattaaatgtaataaaaattgctaatgccttagtatatttgttacttggcaattgctttttatgcttacgcttaaatcttaaccaataatcattgataataatagcgcacgcatggaaaataccgtaaacaacgtaataccaagttaccccatgccaaaagcccataattaaaaagttaattaaataggctacttgtgaaaggcgaattcgatttttgaacaactttttcttcatagcaaagaaagtaaaacgcatgaagataaagtctctaaaccaaaatgataaagtcatgtgccatctattccaaaattccttaatattaggcgaactaaacggcttgttaaagttcataggtgttcttatacccatgaaacgtgaaattgatactgcaaataatgaataacctgcaaaatcaaagaataaatacatactatagcagtacatatatcctactagagcccatgataagtgtagaccaccattaatttttccattaatgatagctgcttgtgaaagctgaggtagccaataactaccaaatagccatcctaaaacaaacttatacaaaaagccttggaaaagatatttaacagctactgataaatcatctaaatacttttctcgacttggagcttcattataatccttaacaaatcttcgataacggtcaattggtccagatgaaatcactgggaaaaatagtaagaagcgagcatacataattggatccacttcttttattgttccatcacgtaattccataattacctgaactgtcttaaacgttaaataagaaatacccaaaaaaccaattgtaatcggttcgttagctggaatcaccggtgcaaccttaaccatagttaacggaattatggctaaaataacaaataaactaaatatttctgtttttttgccaccatttttaacatacttttggaagccaaaagttactaaaaactgataaatgatatatcctaacaaggttacaccttgttgccacttatctcctccaaaagttaatactaagaaaacaattgaaaaaattgcttcatagactttaaaacgccggccaaaatacaaaccaataattaatggtaacagtaaacctatcaataaaataaaatattgcggattactgtatggttgtaaatttatcaagcgtttacctccttaatcacagccttaatgtcaactttaccgttttgtgagattggcatatcatcacgataaacaaaacgttgtggaatcatgtatggcattatattcttagctaaatcttcacgaattaacttagtaatttcagcttctgaatatttatcttgaacgccttcatttaattcaatttgagcaattaactgttttactttatgttccttatcatatttaggagctacaacaccgtaacgtactaaattgttcttacttagatagaaattaatttcttcaagttcaattcgataaccattaaatttaatttggaaatcaattctacctcgataaaagagcatgtctccatcaaagaaaccagcatcaccagtacgataactgaccttcttgtcattattaaagaaagctactgttgttttttctggattatgtaaatatccctttgaaacacttggacctgaaattattaattcaccttgacccggcttttcacctttactttcatcaatggtaatttcagtatcttcttttactttaccaattggtaaacgatcatacttacttaagatttcatcattaatttcaacttgtgttacagcaactgtcgcttcagttggcccataagtgttaaaaatcttactattaggaaatttctttcgtaaagtttcagcacatttatgtgtcaactcttcaccacagaataagaagtgtgttaaatcatcatggtgattaccattaaaagtaggatctaaaaaacacatttgagcaaatgatggagttgaaacccaaacattaaatttcatcttaggcaaggtagtaaataattggcctaagttttctgtaacatcatgtggcaatattactaattttccagcacttactaaagcaggatataagctcattactgataaatcaaatgaatatggtgcttgcgctaaaaagctaggattttcaggcaaattataatcagctaattcccaattaacaaaactcaataggtttttatggctaatttgcacacctttaggtttacctgttgtacctgaagtgaaaataatgtaatagttttcctcatctttaacaaacttatcttcatcaattgaaaacttcccattttcaacttcatcaggcttaagaactgctaaattccccaaatcaacatttggcaattcatcaattgctattactaatggtgattgggaaacttcttgaatcatagtcaaacgttccgcattagaataactagcaattggaatataagcatgtcccgcctttacacatcccaaaaagcaagcaatcatttcaaaagtttgaccaccccaaatcataattggagcattttcttctagttttaaactatcaattttatgagcccaatcatcggaacgttgcttcagctcaccataagtatttgtcttacccaagtagtcataagcaattctttcaggctcattgattgctatttgatcaattcttttaataatattagtaatcactgctaaatcctctaactaaaattcattataaataaagtgcactgaatcaattccgctatattcgtataaataaatcaatgctaataaaactacaaaataaaaaatagttttcaacataaaactagctatagctttacctttagatggcttcttttctgtttcttctatttttttcatcagttcacccctaacattctgtatgttatattacaacaatattacaaagcatagcaatatctacagccttctttacaaatatttagtatctgttactttttaggaagttttttcattgcaaagtaaagtgggattgctacaataaccgatacaaaaaagactgaaaatattacccatcttcgcattcgactcctattatagcaaagttcggttatatcacttagcaaaagagacaaagcaaaagcaaagataatagccatcatccctagtaaaaacaacttaggttgatatcctaataaatataattcccagaaaatagctattggcccaaaacataaccagccagcaagtttagttaaaaagagcacttttttcttaacagttttatccattttttcttactttctataattattaaattctagtaactagaaaacaaagcgttaatatttaatgataatgttcggtccataatcataatttgtgaacgagcataattttttgaacccgattcaaatatgcaaattagctgaccattttcaacagtaatttgttctaaatatggtggtaattcaattaccctctctgcattcttttcatcaagtgaatttaatgcagatactggaaaaatatagagcttggagttttgactaccatatgactgacttaaaaatatcttatcttgatagaaagctatcccctgaatttgcttatccatacttgttgagcctgttgctgttgaccaagcagcagaacctgtacttgctttaatctcatcagtagtaattgaccctttaaaattgccacttctagcaattgtatatcccgaaactgttcccttttcatacatattgaaaaagccaacaaataattgattatcaaaataagtaactgttgaagcccgcgatattcccggtaaattcatttgattgttatacttaattggctttttacctttattgcttttcaattcctctaatgaaaaagaagctaaagcagattctccattaagtgaactagttatccagatatttttagcaactggatcatatgcaactccacctaaatgtggcttaccttttatttgtaatgttttgatatatttacctgtttgtttgtttagtacccagataactgaattatgtttatgcaaaccatcataagctgtaattaacatatatttatcagcaaaagttatcccttgtggcgtcatattagtagctacatctattttcttttttgaaaaattataagctttagtagaaactaatcctggaataggtatatttcttcctacatatgttaaagcgggtgtatcaaatgaaagagtgtaaatccatggatattgtttggataacttcttttcaaattctttttccttataccaagccgcactaatacttgtgccatcttgagccttttttaaagttggccttttagctaataaagtttcataatttttataatgttcatatctttgatataaataatatgctccataaaaagttgccaatagaaatagacacaaaaagcaaactcgaaaaacttttttgagccacttccccacgaatatcacgtcctcatcatgtattagtgtctattatacctgaatataagaaaaaagattcccgaattaagttcgagaatctttttaggcgtttaattctagtatttagcttcccacttaattgccctaattgcagcttcagcatccttaacactgtcatcagctagaccttgcttaatagcagtttcgcaaacagctttagcgactgtttgagtaaaggtatgaatttgttttactggtggtaaaacagctgcgcccggcttagtagtatcaactaaaccaccgagtgaatgagctgcagcagaaatcatttcatcactaacaagttttgccttagcagctaagacacccaaacctacacctgggtaaattaaagcgttgttagcttgaccaatttcgtaatttacacccttgtattcagttgcttgaactggaataccagtagcaattaatgcgcggccatcagtccacttaagtaggtcatttggcatagcttcaatcaacttagttgggtttgaaattgggaaaataattggtctttcagtattagcagccattgctttgattgcaccttcagtaaaggcacctggagtagttcatcacgcttggcttaactgccttaatgatagcttcaagatcagttaattcttcactgttttcaaattcactacgttttctgacaaatggcttttgttctggagttaaaccttcagtatcttcaaataataagccttgcttatcaactaagtagaagtgctttctagcttcttcatcacttaagccttgaagttttaattccttaaagagtaagttagcaattcccataccggcagttccggcaccgaaagttaagaacttttgatcagtcaacttttgaccagaaatttcaagtgcacctaaaacaccagctaagcagacaattcctgtaccttgaacgtcatcattgaagacaggaatatcattacggtacttatctaaaatcttggttgcattgtcacgaccgaagtcttcaaagtgaatgtatacttctgggaaaagcttacgtgcgctcttaacgaacttatcaaccatgtcatagtacttttcaccagtaacacgcttatgcttaagacctaagtaaagtggatcgtttaataaagtttcgttattagtaccaacatcaagtgaaacaggtaaaacttggcttggatcaattcctgcggcagcagtataaatcattaacttaccaacagaaatgttaactccgttagcaccccagtcaccgatacctaaaataccttctgcatcagtaacaacgattaaacgaatgtcacgaccatcagcggcattctttaaactttcttcaatttcatcagtatcatcgattgaaaggaatgctgcttcttgtggtaacataaagatttcactgtattgttcaatagcaggtgcaattactggatcatagacaataggaagtaattcttcgatatggtgactcaatacgtagtaaaataaagtacggttagtattaaatacttccattaaaaacttacgcttttgcataccatctggtctaatcttatattggtcgtagactctcttggcttgttgttcaatagtttgaacatcactaggcaaggtaccaattaggcctaattttttacgttcttctttagtaaaagctgttcctttgtttttaaatgggttgtgaataatatcaatagctttcataaaactccacctttctgacaatttagtcatatttatcgcgtttacaagatgagtttattatccccgataatttattgtcaaagactattcttaccataaattttatttatatgaggtacaaaatgaacttgcaagacttaaaatactttcatgaattagtaacgcaaaaaagctttactcgaaccgctgaacgctttaacgtgagtcagccaactatcactgctgcaattaaacgtctagaagcacaatttggtagccatttattaattcgggaccaatcccataaaaaaattattatcactaaagctggtatgcaactagaacaacatgctcaagccgttatcaaagagatggcagttgccgaaactgaactaaagcagaatgctgaagaagatattttatttggtttaccacctattataggggatcatttcttcccaccttttgcaggcaaactattaaaagaagatattctaaatcatttaaatgtactagaattcggctcaaatgaactactaaaaatgctcttagctggtaagattaatctagctttgttaggcctagttaacattcatagaagtaccgatgttaaactaaacgttttagccaaatatccttttaaagtgattgtttctaaagatcacccctgggctaagaaaaaaggtgtttacttcaatgaattagctggccataatttcattaacttaacagaagacttcgttcaaaatcgcgctcttcgctatttgcaagagcaaaataaggttacattaaaaacaatttatcgctctcctgatgttgcaattattaaatctttagttgcccaaaacctaggaatttcagttttaacttcacttgcaattgataatactcgagacttagtagctctgcctctacttgatgacaacacccctaactttaatgtcgttattgcaactagaaacaactatcttctcagcaaaaaagaagaacaattatggaacattttagccctatcataaaataaaaatattttctttacatttattgatatatttcatcaaagttttttcacaatttgcttctattatatgaaccatagcaaacaggaaataattcttattgctatattccaacttttttcattctcctccaaaatatgaaaatcaactttaatctattctatcccccaaaaaatagattacacatattccccaaggtattgctaattagcaataccttttattgtgaagtaaactataaaatcatattttggatataaataatttacattttttcaaattttaaatcacattttattcacaaatatgctctaatatataaaccatagcaagaggaagtaatcctccaagctataacacccccaactttttcattcattctcctccaaagtaatgaaaatcaactttaatctatttccctaaatagatatttcatataatatattcctcaatgtccccgtctattaagacggggtttctttgtctatcacgaacaaatgagtttaaagattataaagcttttctttagcttttcttaaatgttttggcaaaatttgttcacaattaatctatattatataaaccatagcaagcaggtagacttgctatactcccactttttatttcattcattcttactcctccaaagtagattgaaaccctataaggtccgccttcccagcggaccttttttattgtctttaatatttaatttcaatacttggtactattaattataatgtttttcatctattatgtaagaaaacgctttaaattattatagaggagttacttatgttctcaccaacaattcaacatttagtcgagcaaaaatctggggcttttttaattcctgcttcaaaaatagcttttgttcaggaagatgcacctttatatcatgcatttttaattctcactaaagttaaatatgcaaaaattcctgttttaaaccataagcaacaagtagtagggctactttctttatctatgattactgaacaaatgttaaccgagtcagatatttcaattgatccattatctaatatgaaagttagcgaagttatgcaaacaaaatttacaacaatcaattttgttaatacaaccatggaagctcagttgcacttgctaattgataatccctttattccagtggtgaatgattccggagtttttcaaggacttttaactagaagagaatggataaaagcctttaattatataagccatgaaatagagaaaaaatatgatattaccaaaaagtagtctatctcgactgctttttattttataatgattataatttgcaatttataatcattatagtttacatgttaatgatttggtgttacattttaaacaagatatgattgcaagcaaaattgggggtttattcatgaaacatcaatggaaattaatcgttgctctaattcttggagttgtaggtgcaattttagactttgcacttcatatgcctcatcttacagccattattattgatattgcagcattattaatggcactatctatgcttagagaaatggtcatggacttaaaagctggtcattggggcgttgatatattagcaattatcgccgttataagtacggttgctgtcaatgaattttgggctgcttggatgattttagtcatgttaacaggtggggaatcccttgaagattatgcgactagtcaagctgataaggaattgcgtagtctgctttccaacaatccacgcctagctagtaaattagttgatggagttgttactgaagttaaagttgatgatttaaaaattggcgatcaagttttagtaaagccaggtagtcaagtccctgttgatggtataatccttactggtgattctagttttgatgaatcatctttaacaggtgaatcagttccagttgaaaaaaatgtcggtgacactataatgtctggttcaatcaatggcgatgctgctataacaatgcaagttactaaattggctaaagattccgaataccaaacaatcgtcgctttagtgcagtcatctgaagcggcccctgctaaatttgttaaaatggcggaccgttatgctgttccttttaccattatttctttaattattggtatttcagcttggattagttcaggcgatccaactcgcttcgctcaagtaatggttgtcgcttcaccttgtcctttattaatcgctgctcctgtagcattagtatctggcatgagttctatgtccaaaaaccacatcataataaaaagtgggactgttcttgaaaagctttcacgtgctaagacttttgcctttgataaaactggaactttgacaagaaatcaattagttatcgaccgcattgttcttgaaacaggtattgataaagatgaattacaaattttagcagcaagtgttgaacaagcttctagtcatatcattgctacaagtttagttaaagctacaccaaaagcaaaattgcattctgtaacagatttagaagaagttacaggccaaggtgtccgtggaaaagtagcgggtaaagttgtctgtgtaggtaagttatcctttgtagctcctgataaaaagttagaaaatatcaattcaactgcgatttatatttctatagataataagtttgctggatatattacatttgcagaccaaatcagacctgaaactcctgacacaatttcttctttaagaacccaaggtgctcaacatattatgatgttgacgggtgataattctaaagttgctcaaaaagtagccgcaattgcaggcgttgatgacgtccgctcttcacttttaccagctgaaaaaattgctgctgtaaaaggtattaaagctgaaaatagacctgttgttatgactggcgatggggtaaacgacgcacctagtctaatggctgcagatgtcggtattgctatgggagctaaaggagcaaccgctgctagtgagagtgccgacgcagtaattatggttaatgatttatcaaaagttagtgatgctgtagcgattgcaaaacatactatgaaagtagctaacattgatgttttaactgcaattagtattgttatcttaattgaaattgtcgcatttacaggtattattccagcaatggcgggggctattttacaagaagttgtcgatttaattactatttgtctggctcttttagcaaaaaccacccctaaaattatgcgtaataaaaagaccactaatttgcaaaaaaagacagaactgcgtaaaatatttagctagttaaatagattttagtggttggagtttaaaagctttcaagatttgcttctttgggtcaagaagccccttgaaagcttttttctttaccatagaaaggttaatatatgcattttattggtgaattaattttaatcctattaattacgaccttgttaggccagctgtttactcggcttaatttaccagcagtcatcggacaattattgtcaggtatcttattaggacccgcaattttaggattaattaaaacaaataatacaattactttgttttctgaattaggtgttatatttttaatgtttttagctggattagagagtgacttagagttattaaaaaaatattttaaacttagtttttctgttgcttttattggtgttatcttaccagttatcttcatgacaattgccagtcaattatttggtatgaaatttttagaagccttgtttatcggaatagtatttgcagcaaccagtgtttctatttcagttgaagtattgcatgatgctaatcaactccatactaaggctggtaccgctattttaggagcagctgttgttgatgatattttggcagttgtcgttttaagcttatttacttctttctcacatgaaggtggtagtaacggcttaaccagtaacttagctttaaatttagtaattgaagcaatttatttcgtaattgtatggatgatttttaaatttattgctccatatttcatgaaatatgctgaacaaatcgaagttaattattccgtagtcattgcctcactaatcctagctcttggattagcttgggtggccgattttactggtctaagcgcagtagtaggagccttttttggtggtttagcaatcagacaaactccacaacataaagaagtcagttccgcagttagtgcgattggatattctgtattcattcctgtattttttgcggatattggactttcaatgactttttcaagttttacacaagatttaatctttattatagtaatgactgttttagcactattatctaagttttgggctggaaaatatacctgcgaattattcggatttaacaaaattgatgccaatatagtaggcgcaggtatgatttcacgcggggaagtagcattaattgtggctcaaattggtattgcccataaacttttccctgaagatatctattctagtttaatcttagtaataatcgtcactacaatcttgtcaccgttcattttgaatcattatctaaaacaaaaagcaactgtttagttgcttttttcatacacttttattcattttctgctatcttaatcttaataagatatataggaggaaaaatatatgtctatcgtagatcatttagtagacaagcttaataataaccccgccttcgtttttacttccgttattttagttattatatctactctttttctttatttatggattaaagaaccccggagattaattactggcaatatttttgcattagttgtcttaatttggggcttttggttaagtattttaatttttaaactaactcctccagttattcgctatctttggtcagtagcatttgtagttggtattttattaatcttattactatcatcatttgcttggctatttttactatggaacgcttattttatctggaaatacgaaagccacactctgcccaatatgttaaccctgcttatgggatttgccttgataggattatggctttatcaaaaatttactcactggcttcatcttccaccctatttagctcctatcttgggtctagctcctacaattgcaacctatctaattattgtaatgttaagtttcatcataaatgtttttctttatcagttttatccaaaaaagtattgtgaaaattatttaatcgtactgggcgctgggttaattaacgggacaaaagtttcaactctgttagcaaatagaattaacgcaagtattaattatgctaaaaaagttaaaaagaaaaccggaaactggccaaaaataataatgtctggtggacaaggtcctgatgaagaattgtcagaagctgctgcaatggctgaatatgcaattaaagcaggaattccccgggaaataataattttagaaaaccaatccacaacaaccttagaaaacatgaccttttctaaaaaaataattgaaaaagacactaaaactaaaccatacacatgcaaattctttagtaataattaccatatttttagagctgccatattggcaaaaaaagccaatttaagtgctaatggtgttggtgctccaacccgcttatattacttgcctaatgcattactgcgtgagtttgctgctatctttgttttaaataaaaagagacacataatcgttattagtttattaactttgattagtgttataagtttagtaatccaattgatttttcactaatgttcgtattttaaaggtataaagtctattatttgaataaaaaataaaaatagttcgtttttcttgttgacgaactatttttttcttggtaaaactaatacataagctcaaaaaacatttgagtgaagttggaggtaaatatgaagtttaagaagattgttgttggggcattggctcttcttacagctactgtagctactgcttgttcaagtaataatagttcaaaaactagctcaagtactggttatacacctaagaaagtacttaatgttcaatttgtacctagctcacaagctagcactttagaagctaaggctaagccacttgaaagtttgctcaagaaggaattaggtatccctgttaaagttaccgtttctaccagtaataacgccttagtagaagctatgagttcacatcaagttgatgttggtttcttaccacctgatgcatatgtacttgcacataagcgtaagattgctgatgttttattacaagctgaacgttatggctatgatgaaccatctggtaagatgaacaaaactttgatggataaatatcgcgctatggttgttgtaaagaaggggtctaagattaaatcttggaaagaccttaaaggtaagaagattgctgtacaagaatcttcttcaacttctggctatgtatacccagttgctgaactttataaaaaagggttaaacgtagttaaagactcaactttgacacaagttcaaggtcatgaccaatccgttttagcagtatataacggtgacgttgatgccgcattcgtttttgctgacgcaagaaacatcgctgccaaagatactcctcaagtcatgaaagatgtagttcctatctactttaccaagtggattccgaacgataccatttcagttcgttctgatatgtcacaagcttaccgtacaaaacttaaaaaggctttcaagaacttaatgaagactgaaaaaggtaagaagattatgtcaagtatttactcacacatgggttacaaagactcaaaagattctaactttgacgtaattcgtgactacgaaaaaactattgaaaaagttactaagtagtaattaaaaatccgattcgtatacataatttgtctctaaagctatcgagaaatcgatagcttttttgttattcctaaattcacttatcgaagcttgagcctttgaaatatcgctacagtaaatacattttatagtatctctcttaagattatttacccagatattgtgcttttccacttttcaacatttttatccacaagatattgtgttattttttgaaaaaatctatatatcgtgcctaatccttacagactcaaagcttagcaagatttatcacattttataaacgctgatatatcaaggctttagtggatttagcttgctttgacagctaatcaaaagactgttaatgttgattgacgttaagaaaattatttggggagaatgtagatgcaattgaaaattaaaaaagttttatcaataagtatccttctatcagcagttggcttgagtatggcagcttgttcaaacaaatcttcaagcagcaacgctaaaaatgctgatcacagtattgctttagtcactaacaacactggggttgatgatcattcatttaaccaatcagcttgggaaggtcttaaacgttatggtaaagctcacgacctacttaaaggaaatggcggttacaactactttgaatctagttcagctagtgaccacattccaaacatcgaacaagctattaacgctaaatataaaactattgttggggttggctatgaattaggtgacgctattaataccgaatccaaaaagcatcctaaaaataacttcatcatgattgataatgttatcaatcgtaaaaatgttgcttctgccacatttaaatctaatgatgcatcatacttagcaggatatgcagctgcatacaccactaaaacaaatgttgttggttttgttggtggtgcacacggggtaatccttaacttatttgatgctggttttgcaaaaggtgttgccgatgcagcaaaagaacaaaataaaaaaatcaaaattatcaatgcttatgttggagacttttcaagtgtagataaagctaaggctatcgctaaagctatgtacgctaataaagcagatgttatttatcaagtagcggctactgccggtgaaggtgttttccaagaagctaaagacatcaatactaaaaaagcagccaatgataaagtatgggttatcggtgttgactcagatcaatcaagtcttggtgtatataaagataaagatggtaaaaaatctaacttcactcttacaagtacaattaaaggtattggtaaggctgtagaagacatcgccaacaaggcttatgacggcgaatttcctggcgataagcactttgtttatggcttaaaaggtaacggtacttatgtagtaaaaggcaatatgagtgattctgcatgggctgctgttaacaaagctaaacaaaatgttattgatggtaaggttaaagttcctactacaccttctaactaagtaaacaaatttaataaacgaacaatatataaataaggagattggatttttaatgaatttgaaaaaagttgttatttttggtgttgctactctttcagcatttgcaatgactgcatgctcaaacaaaactgctactaattctaatggtaaaaagaataaagggactgttgcattaatcactgatggtaatggggttaatgaccactcatttaatgaatctgcatggaatggtttccttgcttatggtaaagaacataacttgactaagggttcaaatggctaccaatacttccaaactagcggtgcagctgaatttgttcctaacttagaacaagctgctaaaaactacgatacaatttacggtattggctaccaattaaaagatgcagtttctactgtagctaaaaaatatcctaaaaagaattttgccattgtcgatgacgtaatcaagggtcaaaagaacgttgtttctgcaaacttcttatcaaatcaagccgcatatttagctggggtaactgccgcatacgaaactaaaactaacgtagttggcttcattggtggtgcacatggtgatattgttgacttgtttgatgctggttttactaaaggtgttaatgacactgctaaaaaattgggcaaaaagattaccattttgaaccaatacattggtaactttaattctagtgataaagctaaatctattgctcaaaccatgtatgctaaaaaagcagatattgtgatgcacgctgctggtggtgcaggcgatggattatttgaagaagctaaagctattaaccaaactaaaaaagctagtgataaagtttgggttatcggtgttgacactgaccaatctaacttaggtaactacaagtcaaaagatggtaaaaagtctaactttgttttaacttctgttattactggtgttaatgttgccgttaaagatattgctgaccgtgcatatgaaggtaaattccctggtggtaagaacttagtatatggtttggatactaacggtgtttcaatcactaagggtcaaatttcaagcaaggcttggaaagcttcaagaaccgctagaaccgctattatcaatggtaagatttcagttcctaagcacccaagcaaatagttttattccttactttttaacttatctatctttctatacatactacttaataagaagggctttttagccctttttatttttatataattcggattatataaaaaagatgaatcgttccaaatttaattgttctacgctcttgacatatatcaaacaaagttgttatattatctctatattgttcgtatatttgtttatggaggatgttaacattgattaacgctaagttaaaaaaagttatgggaactggtttagtaattgctacaaccgggttagttttaacagcatgtcaaggcaaaggggcaaagacctcatctagttctaaggcaaatcattctattgcactaatcactgactccaatggggttgatgatcactcattcaaccaagctgcatggagcggattccaagcttatggtaaagaacatggtttatctcaaggcaaaggtggataccaatacttccaatcaagtagtgcctcagattatgaacctaactttacccaagctgttaatgctggttaccaaacaatttacggtgttggttacatgctttctgattctgttaaaactgctgccgccaagtatcctaagaaaaactttgtaattattgatgatgtaattactggtaagaagaacgtagctagtgcaacattcaaatctaatgattcttcataccttgctggtgtagctgctgcctacactactaaaaccaacacagtaggctttattggtggtgctaagtcttctgtaattgacttatttgaagccggttacattcaaggtgtaaaggatactgctaagaaattgagtaaaaatattactattttggatcaatatattggtgacttcacttcaactgataaagcaaaatccatagcacaatcaatgtacgctaaaaaagcagatatcgtatatcaagctgccggtagtgctggcaacggtgttttccaagaagccaaagatttaaactcagaaaaagcagttaatgataaagtttgggttatcggtgtggatattgaccaaacctctcaaggaaaatacactgctaaaggtggtcaaaaatcaaactttactttaacttctgttctcaaaggtttgaattttgctgttaaagatattgctaataaagcatatgatggtaaattccctggtggaaagcacttagtttacggactacaacatgatggtgtatcacttaccaagggtaatttaaattcaaaaacttggaaagccgtgcagcaagcgcgtcaagacattattaatggaaagattaaggttgcaacttctccaagtaagtagcacaatatatagtgtgtcatttctaaaacacttcgtgatgatacgaggtgtttttttataaatatcatatagggaaggaaagccatggaaaaagagaacacaaacattattgagatgcgccatatcgttaaagactttaacggatttaaagctaacaacgatatcaacctcacgctcagaaagggcgaaatcctggcgcttctaggtgaaaacggagctggtaaatctacattaatgagtattttatccggtctgcttaaaccaacctctggagaaatctatgtcaaaggaaaaaaagttgtaattgatggtccaaatgctgccaaagaattaaaaatcggtatggttcaccaacactttatgttggctaaggcctttactgtcttagaaaatatcattttaggccatgaaacaaaaagaggaattaagcttgatttcaaaactgctcgtaagcaaattatggctctttccgagaaatatgggctagcaattgatcctgatgcaaaaatcgcaaatattaccgttgcccaacaacaaagagttgaaatcttaaaggtactatatcgcggggctgatattttaatttttgatgaaccaactgctgttttaactcctcaagaaatcactgaattcatcaaaattatgaaaaaccttcgtaatgaaggaaaatcaattattttaatcactcacaaacttaatgaaattcgagaatcagctgatcgtgttaccgttattcgtcatggtaaaagtatcgggacagttgatgttgaaggagctactgatgaaagcttagctgaaatgatggttggccgccacgttaactttaagttgcctaaaaaagaagctaaagttggtaagactattttgtcagttaaagacttaatggttaacgaagatcgtggcacactagctgttaagggattaacttttgacgtccatgctggagaaattttgggtttagccgggattgatggaaatggtcaagacgagctagtagaagctttaacaggcttacgtcacgttaaatctggtcatttcactattaaaggtagtgatatgaccaataaacgcccacgtaaaattactgaattaggtgtttctcatgttcctgctgaccgtcaaaaatttggcttaattttggaaatgtctttagctgataacattgctttacaaacttactaccaaaagccatattcaaatcatggtatcatcaatcataaagctattacagagcatgctaaaaagttaattaaaaagttcgatgtccgaacaaaagacgagaatcttaaagctggtgaattatcaggtggtaaccaacaaaaagcaataatcgctcgtgaattggatcgtaacagcgacttaattattgtattccagcctacccgtggtcttgacgttggtgcaattgaatatattcataagcaattattagcgcaacgtgatgctggtaaagctgttttgttaatttcatacgaattagatgaaattatgcaattatctgatagaatcatcgttttacataatggtcaagaatctggtgaagtattaccagaaaagacttctgaaagagaattaggtttattaatgacgggagcccacaagaaagaaggtaccaattaatgtttaaggttaacgctgaaaccaaaaagattttagtgccccttatttccatcgtagccggctttttagttggtgcagttattatgctactttggagttacaaccctatccttgcttacacttcaatgttttcaagtgctttaggcaatatgaatggcttaggtgaaacaattagagaagctaccccacttatatttactgcaatcggtttttcaattgcaagtagtgctgggttcttcaacattgggttatctggacaagcacaaggtggctggttagctgctatttggattgcccttgctaatccacacatgcctaaatacattcttttaccttatgcaatcattgttggcaccttagttggtgctgctattgcaggtatcgcaggggttttaagagcttattttggaacaaatgaagttatcgtaactatcatggttaactatatcgttttatattcatgccaatacttgatgcaaaacgttatgaataaaaacttacgtgtttcaactgacgccactaaaacagtatctaataatggtactttacgtttagattggttaagtaacatttttgggggatcaagaattaatgctggtatcttcctagctttaattgccctagtagtcttttggtttattatgaaaaagacggttactggctttgaaattaaagcagttggtcttaatccgttcgcttcacgttatgcaggaatgagtgctaagaaaaatatcattatctcaatgttattatctggtgcatttgctggtttaggtggcgtagttcaaggcttaggaacatatcaaaattacttcactcaaaccaccagcgttgatattggttttgatggcatgagcgtttcattacttggtggtggtactgctttaggtattttgcttgctgccctacttttctcaatccttaaaatcggtggattaggtatgcaaactttagctggtattccttatgaaattgtttcaatcgttattgccgctattattttctttgtcgcaattaattatgtaattgggcttttattcgaaaagaaaaagaaaaactacaatcaaccagaaactattgctaaaatttcgaataatagtgtagatggtccggcagtcaaagtcggaaaaggaggagaagtttaatgaatatcacaactatgctagctttgatcgtttcatcaaccctagtttattccgctcctcttatctttaccgctttaggtggagcatatagtgaacatagtggaattgttaacgttggtcttgaagggattatgacaattggggctttttcaagcatcgtcttcaacttaacctttgcatctacctttaagagtgccactccatggttaggggttatcgtggccggtatttgtggcttgattttttcactactacatgctgtagcaacagttaattggcgtgctgaccatatcatttctggtactgttcttaatttaatggcaccaccacttggggtatttttaatcaaagcaatgtatgacaaagggcaaacagaaaatatttctgctaacttcggttattacaatatccctgttctttctaatatccctgttattggcgatattttcttcaagaacacttccgctccagcttgggtagcaattattctttccattgttctttggtgggtactttataaaaccccatttggtttacgcctccgttcagcaggtgaaaatccacaagctgcagatacaatgggtgttaatgtctataaaatgcgttatgctggtgttttaatctctggtttactcggcggtatcggtggtggtgtctttgcccaagccatttctggtaactttagtgtttcaacaattgttggtcaaggattcatggccttggctgccatgattttcggcaagtgggacccaattggtgcaatgctcagttcactattctttggctttgcacaaagtttaagtatcattggtagtcaattaccattcatttctcatgtaccatctgtttacttacaaattgcaccttacgtaattacgattattgttttggtagcattctttggtaaaagtgttgctcctgctgcagatggtcaaacttacatcaagtctaaataacaaaaaagaagctttcgaaaaatcgtaagcttcttttttgacttttggactataccggtatacaatgggctataccaaagagagaggagtaattatttatgaaaattattgtaactaaagataaaattactggtgctgcaaaagcttttgaaatattttcccgggaaataaaagccggagcaaaagtattaggtttagcaacaggttcatctccgattgagttataccaaaatatgactaatagcgacttaaatttttctaatttaactagtattaacttagatgaatatgttggcttagatccccacaacaatcaaagttatcactacttcatgaataaacacctctttaaagataagccttttagacattcttatcttcctaacggattagctaccgatactgtagctgaagttaaacactacgatcaaataatcaaagaaaatccaattgatattcaacttttaggaatcggacgtaatggacatattgcctttaacgaacctggcacttcctttgatagtactacccacgaagttgagttaactcaaagtacaatcgaggctaatgcccgcttctttgataacattgatgatgtgcctaaatctgccatctgtatgggtattgcttcaattatgtcagctaaaaaaattgttttattagcttatggtgaaaaaaagcgttgggcaattaaacatatgattgaaggaccaatcactgaagaaatgccagcttctattcttcaaaagcaccccgacgtaacgattatttgtgatgaggcagccgcacaagatttagataaaaaatatctaaattaataaaattaaataacaaaaaagggcaagtagatgagccttttctacttgacccttttttctttgttattaaattaaaaaaagacttgtagctccccatatcttgaattacactatagaaagcaaactatatgttgtgatattaaagaaagagcgtgatgacagttattgtattaagtggaccaattggagccggtaaatccagtttaacatctattttagcggagcatttagggagtaatgctttttatgaagacgtttcaaagaatccagttttgcctttgtattacaaggatatgaaacgctatacttttttgcttaatacctacctgctcaataagcgtttagcacaaattaatgaagctttatctgaaaacaatccaaatgttgttttagatcggtcaatttatgaagatgccttgttttttaaaatgaatgctgacagtggtattgctgatccaactgaatgtgatatttacgttgatttagtacataacatgatggaagatgtccccggaaatcctcataaaaagccagatttacttatttatattaatgtatcgttagataacatgctaagtcgtattaagcgtcgtggtcgtgaatttgagcaacttgaaacagatcctagtttaaaagaatactatgcacgcttgcgtaattactacggaccttggtatgaaaactactcagaatcaccaaaaatggtaattgatggcgataaatataattttgtcgataatgaagatgaccgcaaggctgttttagaattaatcgataataagttaaaagaattgggtaatttataatttatctaacaaagaaggaacgtgatgacagttattgtattaagcgggccaattggagccggtaaatccagtttaacctctatcttatctaaatatttaggcactcaacctttctatgaaagtgttgataacaatccagttttgcctttattctataaagatccaaagaaatacgcatttttactacaaattttctttttaaatacgcgttttcatagtattaaagccgcattaactgacgacaataatgttttggatcgatcaatttatgaagattcactattctttcacatgaatgcagatattggtcgtgcaaccaaagaagaagttgcaacttatgatgaattactagattcaatgatgaaagaacttgaacacatgccaaagaagcatccagacttattagttcatattgatgtatcatacgaaacaatgattaagcgtatccaaaagcgtggtcgcgagtttgaacaacttgattatgatccaactttagaggattactataagcgcttattaagttactatgaaccttggtatgaaaactatgattactcaccaaaaatcaaaattgatggtgacaagttagactttatggcaagtgaaaaggatcgccaagaagttttggatacaattgttgcaaaacttaaagaaatggataaattacctgaagattggacacctagtcataactaatagaaaagctgatattatcttctgcttgaggatatatcagctttttatttattcagttttagcaacaaataactctttaattcgcttatcaaatggaattatatatttatttttaatgttttaaaaatatttttattatgataatatatttataacttagcccatcatctagccttttattgggaggtgttttaatgagtattattaaaataagcaatctatcattcagctatgacaatagcgataaagttattttttctaatttaaatcttaatttagatagttcttggaaactaggcttagttggtagaaatggtcgtggaaaaacaacattcctgaacttactgcgaggcaaactcaaaggaagtggcgagatttcaactaatctaactttttcctacttccctatccaaattgctaatccagacaatctagttttatatgaactgcagaatcaagttaacttcgaagtttggcaattagagcgcgaactaaacttaatgcagcttaatcccgatttactttggcagccatttaataccttaagtggtggcgagcagacgatggttttgttagctttatcgtttgttagccagaattcttttgccttaattgatgaaccaactaaccacctagatgtagctaacagaaggcaagttgccaactacctaaaaaagcacaaagaaggttatattattgtcagtcacgatcgtgacttcttaaatgaagtcagcaatcacgtgctggcaattgagaataacgaaattcacttatatcaaggtaattatgctagttatgaagcaactaaagataagcgagacaaatataatcaagaaaaaaatcttaagctaaaaagcgagattgcttcactcaaaaagagcgctagacaaattaagagtttttctgaaaaatcggagaaaaacaaaaatgctgctgcccataaaaatgaaattcacgctgatatcaataagggtttttatggtcataaagctgccaaaataatgaaacgctcaatcactatgcaacaacgagtaaataaaaagataactgaaaaagaaggccttttaactaatattgaaaaggcgccagacttattaatgaactttagccctaattaccatcaaactctcctagaactgcaacacttaagtttaaaaattgataataaacctttatttcaagacttaaacttaatcattaaaaatcatggtattgttgccctagaagggaaaaatggttctggtaaatctaccctactaaaatttattctgaataagtctaaggctgaagctagtggcaaaatgatactagcaaatgggctaaaaatttcctacttgccacagactttttcaacatatactggcaccttaaaggagttttctgaaaaaaaacacattacatattctgatttgctgaataatttgaaaaaaatgggctttctgcgagctgactttaccttaaaaattgaagatatgagcatgggccagcaaaaaagagtcgcgctggcaaaatcattagttgaagacgctgacttttatttatgggacgaacccgcaaattatctagatgtttttaatcaagatcaattaattaagctgctaaagcaaactaagccagctatgattctagttgagcatgataaatatttcattgagcaagttgccgataaaaagataaagttaactagttagtttgccaaacaaaaatagcatccatgtggatgctattttttatgccttagttaacttcaattcacggtcgaataacttatgcatttcaggagttaaattatgggcaataaagatgacagtggcgggactttgcaataaattctgcaaaataatttgcgtattcttagaatcaatggcactcgtcccttcgtcaattaagactaacttactttcataaacttgggtccgggccaagactaccttctgtctttgcccacctgataaattatccttatctaaatcaaccatagtcttaatcccttgagggaacttggttaaatcagtccctaattgaaccttgtcagcccaagcttttgctttttcattcaaagaatcattaaagagcgtaatattttcttgaattgttccagggaataagactggatcttgcggaatataaccaatttgattcaagttaggcttgagaagcttaccatttttgtctttgaaaacaattttcccactacttggcgttagttcatctaagattagcttaaatagtgttgacttccctgctccactatcaccagttaaaagaaccttttccccttgcttaacctcaaaattcgggaaacgtagttgttcaccattagggaagttaagggttaagtcttgcccagaaacagtcgcaaaatcagccaagctatcactggcaactgtagtatctactgctgccatattagcagtgattttttggtttaattgcttgctagattgaatcaaagtaatctgactaacaatagtaaacaaccccgtaaaaattactccagaaaagttaccgatactaaaaaaggcaccaaatggcatattcttagttactaccaataatccagctgtaaaaataattaatacttgggctgaaccattaactaagtcattaaagattgaggtttgactaaccttttttgaccgattaacgtttgctttttccaacttatcagagctcttagctaatacctgaaataattttgctttaacgttataacgcttcaaaattgcgatacctttaaaccacttttcgattgtatcaaggtattctttattattttcagaaacggcaactgtcgctttttcaagtggctttgagataagttgtggcaagacaaacatcgctactgccaagattaaaattaagactactaaaatccaactataagtaaaaacaatggcaattgaaaatacaatattaaaaattgaactgataatttgataaatcggcgttaagaagttatcgttcatcatattcaaatcattagttagtgaattttgaacatctgttggtttggtaatttctttttgcccaaacaacttattcactattttagccctaatctgatggagataggcttgaacttgcttattgaacaaatatgttgcgataaaacccaatatttctcccaaagttcctacaaggaagaaaattaaaatataagttataaaaatgttaacattatactttaataacgagttacccagactagttaaatatgaatttcccagagcaaccagactcgctgatgcgattgccaagacaataaaaataattgctcttagccagttggttttgagtagctttaaaaacgtcatagattctcctcctgattaaaaaaattatttttcttcaaatcacttattatttttacaatccctttatttccatctttaaattttacagaaacatctccaaacgtatcatcaatcaagtaaagtaatttatcatttttatatagataatatggaattaaatcgactagttcccatatacgactatctacagctgtatctttaaaaatcgttttatatttatagattgctataacaatacctgccaatccattgataattgagcctctttgaggtatttcactacttttcaaagtttttacaagcttcaaaattaaactatcatataattctgtattatacacttgccgtatttctaacagacataataacaatccagcagatccattagataaatatggtgaaacttgtgaactaccttccgttatctttaaataatatcctttaccagaaacaattagaaacttattaaacacactcttcaagtactcttgtatatcaactaactcaggtttaatataaacaatcacgcaaaataacgtagcgattacatcgtcggatttcaagtcagaatattgctttacagccccctccatccttattttgttaatcctccattcatcgtaaatcttcttctttaatttcttagttatttcatagcttccatattctaaagtaccgataaataaatctttgctatcgttttctttcttactataagcttcttttgctctttttaatttcaattgattaataaaaatcgtctgctttaagtttctttctatttcttgaatatcatatttttcctcaaaatgatattcaatacttaaatcagcattttctagctcatttatcaatggttttaagctttgagttggattacgataaagcttaaaaatcaaagtaacaaatgcttgcggaattttataaaaactactgtattttttaaaaaatttgattgtagtttttccactattatcaagctttaaaaacatgtttgctctcgaaaataaagatattaatagatagaccaattgtgctttatcttgattcaataatgataaatcatcaattcttttatcataataccccatagttctaaagaacactttatcatcaggttcccttttatttatatatttactttgcgcaagatctataaatgaaacacttccggaattaagattaattattaaattattatctgaaatatctccaataaaaaatttccttttatgaagtaaatcaacctttctaagcaaatcgagaattaacaaacgataaaatcttaaagtatcctgtctttttttagaatttaagaaatcaaatctttctagcgatcttaattcactagcaactatcccttccattttttcttcacacaagaagtaatctttattttcaaaaaaatcatcaacatatttagggataaaatctaagtccgaaagacttattaagttttccttttcacgtttcaaaaggttaattatagatatattctcacaaaagaaatttgggtgagcattttttaatataatttctcttttctcttttgcttgtttagctataaacgtagcccctgagcctttgtgattaactgcagcaattggaatatattctttgtaaagtttagtagcttgctgtaaatcatcaatattattaggaaatggttcttttatccaactaggtattttataagtagggctatcataatcataatattcaatttcctttgtaacaggattaacgatttcttttcctggtccaatcagtctaccaaatctgtaaaaaattaattctgaatccttatatctcctatcagaaaaaattgtaacgccctgttgtcttttgaaaaaatcatcattatgtaagcttagcagaatatttttaaacctatgagtagtagggtaaatagtaatcacctttccaattgcccatgaacaaacaaagccgtttaaattcttttcaatttcttttctctttgcaatatatttaaaattaattttctgattcttgcagaattcaaagcaatgattaatcaccccttcataattgtgaattgttgcagaaatatgaattttaaatccttgcaaaggtattttttctttgtcttcaaaattaaattgcacgtaataattatctgaagatagaccaaaatattttttatcttcatcatcaaaacttttaggtaaaatatcacaaggtacccacatttttacaccttctttaaatatagtttttactaactaagaattttatcatatttttttatcttactgaacattattttttaaaaaagcgttgacgctaataataaaatcatttatagttgagctaaactaaaaaaaggagatgatatgtatggaagaaatgctcaaattgcaaaagctttgtgtccaaaccgaaaaaggcaaagacacaaaagtggactttaccaattttacatggaagtgcaaaatgactgattagtttatttttagtaaatatcatttgtatatttaagttaagctagctttgataaatttaatagcactaccttttttcactctagaccaaaaagtctgggaaagaagtcgattttagattaaatttcgataaacttaaaaaataaaaacgttgatatatcaaggttaataaaaccaagataatcaacgttttttgtgatttaggagtttttccccagacacttttttgtcgtaaactttaaacagagataggatactataccgcatagtgttcaagtgcaggaattcgtatgaaaaaaagtagttttatctttcaatttgtagctatctcgaagaatgtgaacatttgacaccaagctttaaaaattaagtttgattgtctagataaataccttttatcactgattcaaaaacaaccagttatatacttacaaaagtcaaatatttaatgtcataatcaactaatcaacctcattagaataattggtacttcaaaggctatctaaatcaaaattaagaacaaattgtaatgaaaaatcttggctttgatgccagaatgaaactgtcaaattttttgtgtaaatagatctttctcgtaaattgtttttttaacgttttatttattcaaaataggattctaaggtatcctggacttgaccaaagcctttgtgaattcggttgaagtagcggtcattgtagctcattgcttggatgccaataaaagtatcaagcgactgttcagtcgggaactccgctttaggcttagccttgcgcttaatgacgttattaaaggattcgatcatgttggtagagtaaattgaagccctgatctgcttaggataattataaaaaacaagcaggtctggctcgatgtctttcaggtttctaatgacacgattgtagctcttgttccatttggcataaaaagcatgcaatacatcaacagcagccgctttattggcttgctggtgaatctgcttgaattcgttcatgattgcctcgcgatcgtccacgcgtactttagcgcagatgttgcgcataacatggaccaagcagcgttggaaatgagcttgaggataggtctttgccagtgctgctttcatgccgacaacgccatctgaaaggaaaagctctacttgctttaaaccacgagatttcatgttctggagcaacgccgtccagacttcaatattctcactaggcgcaatgtagtagtcgataacttccttgtgaccattaggcttgatgccaatggcaatatatactgcttctcgttcaaaagtttctcgacgcaacggtatatacgttgtatcaagataaacacaaaagaacttatcgctcagcttacgcttgtgataagcctcaactttaggaatcatttgcttagagatattagacacttgagctggactataatgactgccatacattttttcgatcaaattagctatttctctagtggttacacctttagaataaagctttataaccatatcttctaagagatcagtatgttgtttatagtctggcagagtgtgttgatgaaacataccattgcgatctcgtggcacttgtacctcaattgatccaaactgggtatcaattttacggaaatacgcaccatttctagaattaccagtattccagccatttctagcatagggatcatatcctaaaaaggcagtcagttcagattctaacatgtcattaacagcttgttggatttcatgacgaagcaaatcattaattttatcttgattgaatagagcttgagttatatttttggtaaaatcattcatgaaggagttcttctttctgtatgttttttttgttcaaaccaatcatacgagaaaggaactcctttttctaatgttttaggaaattaaattaaggaataattcatccttacacaaactattttacggtctcgccagaatagatatgcatataactttattgatttttaatcatgatttacacttcttttaatggtactagatttaactaatatttctatttattgtaagactaatatcgataaaacaatttgcttaaaattaactaggattaggttaaaaaatagatttaaacaaaaagaatcaagtttcttaaaatattctcatcaacagaatttgccaaagaacctttttttatgccttagttaacttcaattcacggtcgaataacttatgcatttcaggcgttaaattatgagctataaagatgacagtggctgaactttgcaataaattctgcaaaataatttgcgtattcttagaatcaatggcactagttccttcatcaattaagactaacttactttcataaacttgggtctgggccaagactaccttttgtctttgcccacctgataagttatttttatctaaatcaaccttagttttaattccacatattatctaatgctcttttcttccaaataacagccccaatacctactacaattaggatagttatttgtagagcaagagtttgataatctcctttgtaatcacctttataaagaattgacgaaggtaataaataccatacttttaaaagacctgtcagcatattaacgagagtgtgggcagcaaacataaggataatagttactattgacttaaaataagtgttaaataaatatgttatacaagcaatcatagccattgcaataatggataggataaatttttgaatcataatcttagtatctaaactatcaatcgttgatacagccatactcgttttagttatcaacaaaacatatgaaatataagatatcaataaaaagaggactgcaaataatagtattagcaccagttgagcaattaacttagaaataattattttccaattatctttcactttggttatttcataaattatttgtccgttttcttcttcttttttatttgactcagatgttaaatatataactactaattgtggcaaaaaaaccgcccataaaaactgccacatcgacaatccaaatgagatacttgaaaattccccacttatatgtaaatcttttggattaatatatataattattgcaagaactagcggaagaaaggcaatgagaattgggagaatatacatttttttctttattaatttaaatagttctgaacgtacaagcattttagtacaactccttttgatactcgaagtttctttttactttttctacattgccgtgaagcttgttaacctcatttatgacttttactaattcctcatcattgtttacaaccacaatgtttttatctattatttttgcattagtagattgagaaagagttctagttttatcttcattccaattctctgaactcaaaattatttcaatttttttgtcaaatatatctttacgttcaattaattgagcgtcttttatcaacaaatagcgtgttactaccgtatcaatttcttttaattgatggctagaaattataaatgctgtcccttcttcatcagctaatctttttattaatttataaaaaatatctattcctttaggatccaagccaacagttggttcatcaagcaataataattttctcttttgtaacatagctattgctaatctaagtctttattgcataccaaatgaaaaagctttagcttttttagtggaatccggagacagctctactaaccttaatagcttggcaatttctgcttctgacatatttatattttcatacattgcaatcaattttaagttatctttagcagataaatattcaaatacaggaatctcaagtaaaaagccaatttcttttttagttttgcagaagttaaataatcttttctcccacaatattcaacatatcctgtatttaatttgctaacacctaaaattgatttaataaaggtggtttttcctgacccattcttgccaactagaccaacgatttctccagtatttattacaacattgacattttgccataatatatgagtatcatattttttacttgcatctaccacttttaataattctgacattccaaaccacttcccctcttttctgtagggcatgtaagccttttcaattaaattttatcataaaaaaagcaaatatttaagtttgccaaacaaaaagagctttacatataacacgtaaggctctttgagtagatagtttgtttgagttgtttattataatatttttctaatgctttgatgcaccagttgcggcatcttgtgtgccttccatttgattttctttagttacaggatatgctctgcgaactgaaggatcagtatttgaaggtaagttgtcagcagtataattaatttggcgaatatctgcatgcttaacatcttcaacagtcttgcaaccagttaattgcatcaaaatcttgaattcattgttgatttggttaattacactttcaacacccttcgcaccgccaagtgctaatccatataagaatggacgaccaattccaactaagtcagcacctaaagctaaagctttaaagacatgagatccacgacgaacaccagaatcaaggatgattggaactctaccattaactgcagctgcaatttctggaagcatgtcaattgttgcaggagcagtatcaatttcacgcccaccatggttagaaacgacaatcccatcggctcctgctccaattgccatatatgcatcttcagcattcataacgcctttaacaaaaacaggtaagccagacatttctttaatcttggcaacatctgctggccctatcttctgtgctgaatttgcatacatttgtgcaacgctcatcccttccccttcagcaccaacatatctagtaaagaaatctaatggcactgggaaagtaaagttggttcttaaattggcttcacgatatcctgaaacaagtgcatcaaccgttagcataatccctttataaccagctgattttactgcatcaaagaccatcttgttgaagtcccaatctttacttaaataaagttggaaaaacttaggtgagtcaccagttgcagttgcaatatcttcaacacttctgttagcataagtacttgaactaaatagtgcacctgcggccttagccccttgtgcagtagcaacttctgcatccttatgtgcaatcccgtgacaagcaattggacaaatcataattggtgtctttaaatccatccccataaactgggtctcagttgatggattatccatgttggttagtgagcgtggaacgatttgaaaatgattaaaggctgccgtattgttacgccaagtccactcattttcagaacccgaagcaatatagtagtaagctgcttctggcatcacttttcttactctatcttctagttcatcaacatttaccatctttatcgcttcattacgatcactttgcggaaaacctttgtaatatacagtcattgtatttgacccctttactataaattagtaacagcttatctataattatagactccatattaagcgctttcaacaatttgcaattgttatttagtgagcaaaaataatatttttaaatattattttgataatattcgtatttacaacaataatcaagaatgataaagtttaatagtcaggttatttgagtaaatacccgaattttaatcacttaggagttagaaatgaacataattagaaaccacttcgatttagataagctcggtactaatattaaaattgaatttttggccggacttacaacttttgtaagtatgtcttatatcctttttgttaatccaaatgttttaggtgtcagtggaatggataaaggagctgtctttacagctactgccttagctagtgctttaggttgttttattatgggactagcttccaattatcctatcgctactgcgccagcattaggaattaacgctttttttgcttataccgcttgtttaggtatgcatgttaaatggcagactgctttagctgcagttttcgttgcatcatttattttcattttaattactatgttcaaattaagagaaaaaatcattgatgctattcctgttgatttaaaacatgcaattagtgccggaattggattatttattgcttttttaggtctagcaaatgccggattagttgaagcaagtaaatctacttttgtaacagtcggcagtcttaagaatcctactgtttggattgccatttttggattatttgttactatcattttaatgattatgggtattcctggtgcaatttttatcgggatggttttagcagcggtctttggcattttaactggccaaatcaaattaccatcagctattatttcatcagctccaagcattgccccaacttttggtcaagcatttaagcacattggtgatattaatacaatgcaaatgtgggtaattgtcttaaccttcttattagtaaccttctttgataccactggtactttgattggtttagctagtcaagctggtttaatgaaggataacaagatgccacgtgttggtcgcgcacttgctgcagattctggtgcaatgatggcaggatcaattttaggtacttcaccagttggtgcttatgtagaatcaagtgccggaattgctgttggcggtaagagtggtttgactgcggtttttgtcggaattttcttcttaatttctatgattttcagtccattacttagcgtaatcactactcaagttactgctcccgccttgattattgttggggtcttaatggcacaaaatttagctaaggttgattggactaaactagaaattgctgttcctgccttcttaatcgtaattggtatgccacttacttattcaatctctgatggtctttcatggggaatgattacttaccctattactatgattgccgcaaaacgtggtaaagaaattagcccaatgatgtgggtactattctttattttcattatttttatgtgggtacttaacgcttaatctgaacatatatattcagtaaataaatttaggctcgtctttatgttaaactaatgtatactagatacattagtttttttcatatggagggaatcatgaaaaatattaatcgtttctttaagctagatgaacaaggtactagttttaaaactgaactaattgccagtttaactaccttcgttagcttgagttatatgttatttgttgtacccaatattttaactgctagtcgcatgggaaaaggtactgtgtttaccgctttagttctcgcaagtgccttaggtagtatagtaatgggacttgttgctaattaccctattgcgttagcacctactttaggaagcgcttcattttttgcttatactgtatgccaaggaatgaaaatatcttgggaaacagctttagctggtgtgttagttgcttcactattatttgttttaataactattttcaaattaagagaaatcgttattaatgccatcccccaagatttaaaatatgctatcagtgctggaattgggatttttattgcttttatcggtctacaaaacggtaaattaattgttaactctgattcatcattagttggtttgggtagtttttctaatccggccgtttggattgctgtattcggactattggttaccattgttttaatgtgtcttggggtgcctggttctatttttattgggatggttgttaccgcaatctttggaattttaattggccaaattcctttacctaaagaatttatttctatgccaccttcaatcgctcctagctttggtcaagcagttactcacttaggtaatgttaataccgttcaaatggctattgttgttattactttcttattagttaccttctttgatactgctggtactttaattggtatgactcaacaagctggtttagcaaataaagatggtaaaattcctagaatcggtaaagctttaatgagtgattctattggaatgattatcagctctattttcggtgtttcacctcttggaactgttgttgaatcaagttcagggattgctatgggcggtaagactggtttaactgcagtctttgttggattttggttcttaatcgctatgtttttcagtccattgttaacagtaattccaactactgttaccgcccctgctttaatcattgttggtgttttaatggcaagtaatttagctaaaatcaattgggataagttcgaagttgctttacctgcattcttaattgtcttaggtatgccacttacttattcaatctctgatggtttggctctaggtatgattacttatcctattactatgctagcttctaaaagaggtaaagaagtttcaccaattatgtatggattattcttcatttttattatttatctttggattattaacatttaaaacaaaaagacagtttcacgtgaaactgtcttttttatttttgcatatcttttatttgatcatagaccttgcttcggcatttgctgtcgacttctaaaacaactaagtcaccagctaaaagcttagtctttccaaatggaataatatcatgagctcctcgatgaattaacttcaccaaggtcttttctggccatttaatttcttttacttctttatcagctaacttactatcttcaaaaatagttactgtcaattcatcgacgttgtcggcatatacctcaaggctggctgtttccatccgatcagctagactttcataaattggcttcccgccaagtaagtcattaactaaataagctactaaagccaaaacagctagtggcatcaaatgaagtagtgaccctaccatttcagtaattaataaaatcgcagtaaaaggtgaacggacaattccactgaataaaccggccatggagaaaattaccaagttaacaaccaagccctctggtagcatccccaatctaaccataatcaagccataaagttcacctaaaatcgctcccatggtcagaatcggtaaaaagatgccccctggcaagcctgagtcataagagataatcgaaaagataattctaacaatgaaaattatacttaagagcttaattgcattaattgaatgccaactcaaaattaattcattacccccaccaattatttgcggcatgataaaggcaattggaattaacaaaaacaaaggaattaagccatgcataaatctaggaataaaagttaacttatcataaatctttttaccattaagaaggccccattgataaaaacgagccactaatcccaagataatccctaaaacaatcaagtgaccataaagatgaacatcaaagggatgattatatggaatggctaagactggcttttgtccaaagaggttgctgactaagaaattagccgataaagctccagttagggagttaagccacactcttggtgaaaagttatgaaagacttcttctaagacaaacatcgtaccaccaagtggtgcaccaaaggccgcacttaacccgctagcggcaccagcagcaattaaaactcggcgattagtttgactagtttttgaaccaaaaccttgcccaattgcagcacctagttgaattgaagggccttctcttcccaagaacaaaccacttccaattgctaaaacgccaccaagaaacttgcgccagagaattgcccaccaatttagatgcaatttcccttgcagttgtaattcaacttctggaataccactaccacctgcatgaggctcttgcttaaccaaatagccggtaatcaagccgataataataaagcccaggatgattacacctaagagccacaaattagcatgagcagccttaaaaagcgtcaaccagaacgtctgcatttgactaattgcaaagcgaaaggccccaactactagccctgctacgataccaactactaaagagatggccatcaactttaaattaattattttttgtttatccatctatcttctctccaaaaaacagcatagtcttattgtagcgcaaaaaaaggaggcctaatagacatcccttttgaataaattattagccagcaattaacatcaaggctggaactacaattacgaagagtaaagtagttaatgccacaacattagtagcatattccttatcgccattaccttgatcagctaaaattggtaaaacagctaatgctggagtagctgattgaataataaaagtattagccatcaagtgtgctaagtgtaagcccatagctggagcaacaactctaattaagagaatcattactgctggagcaattactaatctacctaaaacagccaaaatagtttgtaagtcgaacttaatgttcttaatcccgatattagctaacataatcccaatgtagattaatgaaagtggagtaactaagttaccaacataggtaaaggtattagttgcaaaatctggcaacttcaatccagttaatagccagacaattgcaacaataaatcctactagtggcatcggtaaaagcttcttccagttaaagcttgcttgttctttagccttacctggcattgcatccccttgcatgaagaaaataccaacagcccaagtagaaacagtattaattacgtagtagattaagaagtattgcattgccttattgccaaataaagccatgttaagtggcatcccaataaaaattgtattggcattggcgatggtattaataaaagttccccgtctaccggctggaattctaaacattgcaattaataaaaaggcaataatataagttaaaaatactcctaaagctggtatcagcattccttcaaataactgtcccaaactatccttagttaagttcttttgaacactaacaaagattgaagctggaagggctatttgcataattaatttagaaatattacctgaaaaagtatcagcaaaccagtctttaattcttaaagtatatcctagtgcaataatcaagataaccacgattacactagaaatagatgagataaacgttgacatagcttcctccttttttaaaaacaatatagatatactatatatactcaagatagctatagtcaaactcaccagcttttataaattatatttataagaaaagatgaaggctataaagccttcatcttcattattctttatttagtaattatataattaccatattatttttcatcataccattcagtgtggaagacaccttcacggtcatttctgaagtaagtgtgggcaccaaaatagtcacgttgaccttgaatcaagttagcaggcaagcttgggttaaagattgattctaggtagttaagagctgcactcaaagttggagttggaatgccattttcagcagcaacactaacaactcttctcaagtcaggtaaacgattttgcatcatcttagcaaagaatggtgcttcaaataagttattaatttctggatttccctcaaaggcatcttcaatatccttcaaagtcttagaacgaataatgcatccagcttcccaattttgggcaataccaggataacgtaaagtccaatcataagccttagcagccatcttaagttgcataaaaccttgagcgtaacaaactgcttggcctaagtataaagcacttgcgataagttctggtaagtcactactaatcttactttgatcaacgctaatttccttaccagctctagtagtagccttagacataaatctagcaagtacagcttctgcaatcacactaataggtgcacctaaaacaattgcatcttccaaagtccagttaccagtacccttataagaagcttcattcaagatatgatcaataaccttatcactggttaaatcatcatccttcttcaacacttcagctgtaatttcagctaagtagcattgcaggtcttcatggttccacttatcaaacaaggcactcatttcatcatttgaaagtccgcaagcctttctaagcatgtcataagcttctgagaagagttgcataatcccatattcaattccgttgtggaccatcttaacatagtgaccactagcttcaggaccaatgtaacttacacaaggacgaccttctggagtcttagcagcaattgcttctaagattggtcttaccttttcaaaagctgcttcatccccacctggcatcaaggctggtccatgaagggcaccttcttcaccaccagaaacacccataccgataaagtgcaaaccgaatttttctaattcatggaaacggcgacgggtatcgtggaagttagagttaccaccatcaattacgatatcaccaggttcaagaagcttggtcaacttttccaaagtcaagtcaacaggcttacctgctctaatcataatcaaaatcttacggggtttttcaagtgaatttacaaattcttcccaagtataagttggcttaagtttatcatctgcatattttgccaaagcatcaacttctggcttatcaatactaaaaccagcaacagagtagcccttactgtggatgttaagagctaagtttttacccataacgctaaggccgataacaccgaattcttgcatatatttacctccatttaacatctatatattattatacttttaagacaacaaaaaagcgaaacttcaagtttcgcttttttatattattaataattgttctagtgagctgaagcacctgaagttgcatcttcttctggttcttcttcaacttcttcctcttcgtgagctgaagcacctgttgctgaatcagtatctaagccatatttttcagcaaagtatgaaaatggctttaatggttctgcttggtacttagcaacaaatgctgggtcatcaagagtattaagttcagttgagtaatgcatgtcatgggtgtacttaacgtcgataagcattgggccatccatcttcttccattccttaactgctgcttcaaattcttccttagtacgaacagttacgcctttaacgttcataccttcagcaacctttgcccagtcattgtctggaataataacacctgataatggttggtgagattcatcttcttgctctgcttgaatgtaaccaagtgtttcgttagtaaatacaacgttcaatacgtgcatgttgtagcgagccatggttaataattcttcacacatcattgcgaaaccaccatcaccagctaattgccaaatttcacggtcagggtaaacagttgctgcagtaagagctgctggtgcaccataacccatagttgcgtgaagacctgaagtagtccacttttggtcgccatgcatcttaagaagacgggtgtggtccatatttacgttaccaacgtcaatagcaaagacagcgttgtctgcagcttctttgttgattacatcccagattggttcttgacgaactggactttcctttgagtccttgaaactatcaagccattcatcccagttttgacggtctgcaatagcagccttgtataatggtgattcatcacgtgcttcacctgcatcgataagagcacgaagtgacttcttagcatctgcaagcattgaaacatcaaccttgtgacgcttaccaaacttagcaggatcaacatcaatttgaattaccttagcatccttagggaaccataatactgagaatggtgagttgttaccaacccaaacaaccaagtcagtgtggccttgaatttcgttagcaggctttggtccgatacgaccgatagtacccatgtatgcagggaattcgtcttctacaatacccttaccaaggtatgaagtaagaagtggagtcttgaatttttcagcaaattccttaatttcttcaccgcatcccttagcaccattaccatagtacataacagggttcttagcttctttaagaagtttaactgcttcttcaactgaagccttagttggttctgcgtagttgtcttcaacacgtgcatcgtagtttacgcggaagttgtcttcaatcttttcccaacctaagtccttagaaatgatcataactgctggaccttttcttgcgtaagcttgacggatacattcgtccattactacaggaatttgtgcagcagtcttaggttgacggcagaatacactagcattcaagaaccacttgtcttcatcaaaagcttggaaaaagtcgatgtcttgacggccttccggaacgttagcaacgattgctaccataggagtcttgtcaaatttagcatcgtacaaaccgttgaataagtgggcagcaccaggtccagctgacccgaaacatacaccaactttaccagtcaacttatattctgctgaagcagctaaagcacctgcttcttcgtgacgaacttcgataaacttaattctatctttccagttgtggatggcattcatacttgaatcgaatgaaccaccagggaaaccgtaaatgtgatcaatatgccagtcatataaaactttaaacatagcgtctgagccattaatttttgccatattgtgcatctccttaaaaatatacttacagttgtaattaaagcactttttttcacaattgcaagtaattgccatcgttatagcgtcgcatatgtaaacgcttttctaaagataatgaattcacaagctagtgttatttattacttacttaattgttaaaataagatttatatttgtgattgccttagcaagagggtaatttaagctagattttttcaaaaaattaaattgtaagcgcctaatttgttatttttaaatttaaacatttcataatatttacaaaaaaagaggaattctcctctttttagtcttcattttcaatcttagaatacttaccctgctgaatataaacagtcaaaattgcaatatctgctggattcactcccgaaattctttctgcttgagcaattgattcaggtcgaatcttttcaaatttttgtcgtgcttctgtagctaaaccggcaatcttactataatcaattccttctggaatcttttttgattctaagcgccgtaatttttgcacctgtaattcttgcttcttaatataaccagcgtattttacatcaatttcaacttgttcacgtacataacgatcactattcagcttttcaccagatagtttttcaatagctgctattgttacgcctggacgacgcaaaaaggcacttgcctttaatccagcatttagtggtgattgaccaattgattttaagtatgcttgaacttcatcatttggatgaatggtaatatcataaagctctgctaaagtttgcttaattgttgcctttttatcctcaaattcttgataacgctcatcactaattaggccaagtttatgaccatattcagttaaacgcaaatctgcattgtcattacgcaagagcaagcgatattctgcccgactagttaacaaccgatatggttcatttgtgcctttagtaactaagtcatcaattaagaccccaatgtaggcttcatccctacccaaagtaaagcctgacttaccttgagcccgtagagcggcattaattccagcaacaatcccttgtccaccggcttcttcataaccactagttccgttcatctgaccagcagtaaacaaattcttgatattcttagtttcaagggtatgctttaattgccaaggttcaatgacatcatattcaatcgcatagcctggacgcatcatttctgcattttcaagaccagcaattgagtgaaccatatcttgttggacttcttcaggcattgaagttgaaaaatcaccaacgtaatattcatcagtatttttaccttctggctctaagaagatttggtgacgtggcttatcggcaaaacggacaatcttagtttcaattgatggacagtatcttggtccaaccccttcaattaccccggtatacattggggcacgatcaaggttgtcacgaataattttatgggtagtttcattagtataagtcatccagcaagaaagctgatcttttaagtagtcttcatctttagtttcaaatgaaaagtgtcttggctcggtatcaccaggttcttcttcagtctttgaaaagtcaatggtattaccgttaactcttggaggagtaccagtcttaaagcggcgtaatttgaagcctaatttttctaagttttctgaaagtttaatggccgcaattgtgttgttagggcctgaagaataagtaagttcaccaataataatgcggccacgagcagaagtaccagtagttaaaaccacactcttagctaaatatttagctccagtattagtaataacgccgtgacatacaccgtcttctactattaattcgtcaacagttgcttggcgcaaggttaagttaggagtatcttcaattgttcgcttcattgtttcgtggtattggactttatctgcttgagcacgcaaagcacgcactgcaggtcctttaccagtattcagtatccgcatttgaatataagtggcatcaatatttttacccatttggccacctaaggcatcgatttctctaacaaccgtccctttagcaggaccaccaacagatggattacatggcatgaaagcaaccatgtctaaactaatagtaattaataaagtcttttgtcccatgcgggcactagcaagggcagcttcacaacctgcatggccggcaccgacaacaataacatcatattcatttgagctatatgtttttagcattttcttctcctacttacctaaacagaattgactaaataattgcgtaattaattcatcaggtgcgctatctccggttatctcacccaaagtatcccaagcacctgtgaagtcaatttgtgcgatatctacaggtacatcattatcaaccgcatcaataacgtcagttaactgcgtcttagctttttctaataagccggcttggcgctgattagtaactaaaacatcattattagaattatgaatcccgctaaagaagagcttgctaatggcttcttctaagtcatccaagttctcttctttcagaattgaagttacaacaatttcagcatttgtttttttagctaggtcctctttatttagtttcatccctaagtcagacttatttaaaactacaatccgttttttatctttggtatagtcgattaacttttcatcttcaggagttaagtcttcactagcgttaagcaaaagtaaaactaaatcagcttgttcaattgcctttttagagcgttcaactccaattttttcaactttatcttcagtatggtgaattccagcagtatcgactaactttaatggaacacctttaattgaaacgtattcttctagcgtatcacgagttgttcctgcaacgtcagtgacgatggccttatcatcttgagttaagtagttaagtagtgaactcttaccaacatttggccgtccaacgattgccgttgccagaccactacgcataatcttaccttcactagccgtttttagcaggcgattaatcttttcaatgacgctttttgaagtttcttgcatttgcttagctgtaacttgatcggcatcatattcgggataatcaatatttacttcaatattagctaaagtatccaaaatttcttgccgcattgtgcgaatcttaaccaataagccaccttcaagctggttcatggccacttgtcgagccttatcagttttagcgcggacaatatccatcacactttcagcctgggttaaatcgattctcccattaacaaaagcgcgtttggtaaattctcctgcttcggccatcctagccccatgctttaatagtagttgcaagattttattagttaccacaattccagcatggcagttgatttcgaccatatcttctttagtaaaggtcttcggtgccagtaaaactgacaccatcacttcatcaactacttcgctagtttcaggatcaacaatatggccgtagttaatagtatgactggcaactttacttaaattttttcctttaaataatttattagcaatctttactgcatcttcgcctgataatctaacaattgaaattccaccttcaccaattggcgttgagattgcagcaatcgtatcaaactcagttaatgtcggcatcattatcttccttttttgtattaaaaaaagcgcaatttccaccacaacgtgatggataaagcactttcactactttatctaatcaaaattagattatttttttcgatttatttttttataagctcgtctgatcttacgttgacgttctttttcagcttgctttttagcttcttgttctcgtgcatacttaaatggattttgcaaaataaatgtttgtattactgagaaaatacttgaaactacccaataaagagtaatagcagttgggaaactaatagcaggcacagcaacaatcaacggtgtaatccacatcatcgccttagtcatactttgactagatgattcaggagctgacatttgtgccacatacgaagacataaatgtaaagactgctgctaagatcggcattacgtaatatggatcagccttgcttaagttcatccaaagaaatgtaccatcttgcaattgcttagttgaataaattgcttggtacaaagcaaacatgaatggtagttgcaaaagcatagggaaacaacctaaatacgggttaatacctgcttctttataaagcttttgcgtttcggcatttaataattgtctactttcagcatcattgcctggatacttagcacgcaatttatcaatttctggttgcaactgttgttgcttcgttgtacttttaattgaaattgcattaagtggaaagagtaataatctaactaatatagtaaagacaataattgtccagccataattcttccctagcaaatcagctagccaaagcaaaaattgtgaaaagtagaaaatgacgtagcgatcccaccaactaccacttgtatgtgatacatgaccggtactattagcacagcccgtcagcactactgcaatagctactactgctaaaaaggctatgaatcgcttgacatttttcttcgttaaaatgtctttcatcctatattccttcatcttcttcagaatcttgatcaatcaacttagccaaagtcattgcatgtaataaattcttcttaacctcagccattgtaaactcacgagcataaggacgagtaattactaagaaatcagctcttgcatcaacttcatccttcacctcagtaagtgtagcacggatgtaacgttttagtcgatttctaactactgccgtatgtcctactttcttgcctacagaaattccaacccgaaaatgcttattttctggacgaattaacttatagacaacaaaggcgcgattagcaactgaatcgcccttattaaaaacagtttgaaaatctttttcagattttactcgataagactttttcaaagtgcttcacattccatccaaacattaaaaaaaccactggaaaattcagtggtttaagcagataagacttttctaccttttgcacggcgtcttgctaaaaccttacggccgtttgatgtgctcatccgtttcatgaaaccatgtacacgttgacggtgacgtttcttaggttggtaagttctcttagttgtcattagtctagcacctccatttttataatgctaacagcacaatttattattaaggatagcatgtttgacgcgaaaaaccaagttatttttctaaaatgggctatttttttagctttaggatttcttgatgtggaaaatttttataaattttttcgtttaattttttatattaacattcttcttctcagagttttccacaaataacaagctgttaaaaaataattccacagcatgtgaataacgttttttaaattcggaataacttcaagttacacaaagattttttattcacaggtgtgcctgttgataattttaaaattatgcttatttttgcaaaaatgtgtattacttcgcttttcattatccacagcctgtgaattcttgatttcttttattcacttgtggaaaacttctttaagcaatgctacaatatactatgtttttacaattaaagtgaggaatttttt
